(19) United States
(12) Patent Application Publication
(10) Pub. No.: US 2023/0322878 A1
(43) Pub. Date: Oct. 12, 2023

(54) COMPOUNDS FOR INDUCING TISSUE FORMATION AND USES THEREOF

(71) Applicant: HISTIDE AG, Schindellegi (CH)

(72) Inventor: Omar F. ZOUANI, Einsiedeln (CH)

(21) Appl. No.: 18/152,624

(22) Filed: Jan. 10, 2023

Related U.S. Application Data
(62) Division of application No. 15/745,021, filed on Jan. 15, 2018, now Pat. No. 11,578,110.
(60) Provisional application No. 62/209,411, filed on Aug. 25, 2015.

(30) Foreign Application Priority Data
Dec. 23, 2015 (EP) 15307127.9

(51) Int. Cl. C07K 14/51; A61L 27/22

(52) U.S. Cl. CPC C07K 14/51; C07K 2299/00; A61L 27/227

(57) ABSTRACT

The present disclosure provides peptides, or variants or analogs thereof, with between 8 and 30 amino acids, having growth factor receptor-binding capability, wherein the RMSD value of the structure coordinates of said peptide, variant or analog thereof with respect to PEPREF is 2.45 Å (Angstroms) or less.

### CROSS-REFERENCE TO RELATED APPLICATIONS

[0001] This application is a divisional of U.S. application Ser. No. 15/745,021 filed on 15 Jan. 2018, which is a U.S. National Stage application of International Application No. PCT/EP2016/070133 filed 25 Aug. 2016, which claims priority to U.S. Provisional Application No. 62/209,411 filed 25 Aug. 2015 and European Application No. 15307127.9 filed 23 Dec. 2015, the entire disclosures of which are hereby incorporated by reference in their entireties.

### SEQUENCE LISTING

[0002] The instant application contains a Sequence Listing which has been submitted electronically in XML file format and is hereby incorporated by reference in its entirety. Said XML copy, created on Jun. 29, 2023, is named 0177-0136-DIV-SL.xml and is 10,001,595 bytes in size.

### FIELD OF THE INVENTION

[0003] The invention relates to compounds for inducing tissue formation, biomaterials and medical devices comprising such compounds, such compounds for use in medical methods and use of such compounds in non-medical methods.

### BACKGROUND

[0004] Tissue regeneration forms an important part of the healing process subsequent to disease, trauma, or surgery. In situations where disease or trauma produces a tissue defect, for example a bone, cartilage, skin, vascular tissue, or eye retina defect, tissue regeneration is a central goal of recovery. It is not, however, a goal that is always or easily achieved and much research has been devoted to newer and more effective ways to promote tissue repair and regeneration. Conventional technics to achieve tissue regeneration involve the activation of tissue-specific stem cells present in adult tissues with repair and/or regenerative capabilities called mesenchymal stem cell(s) or MSC(s) using recombinant proteins called growth factors (GFs). MSCs or MSC-like cells may be found in the bone marrow, but also in tissues such as fat, umbilical cord blood, amniotic fluid, placenta, dental pulp, tendons, synovial membrane and skeletal muscle. Natural regulation of the MSCs is effected through the participation of a number of growth factors (GFs), including vascular endothelial growth factors (VEGF), which trigger angiogenesis crucial for the repair of most tissues, bone morphogenetic proteins (BMP), which induce the formation of new bone and regulate capillary stem cell activation, transforming growth factors (TGF), which induce cartilage formation, and platelet-derived growth factor-BB (PDGF-BB), which is involved in the formation of granulation tissues and the recruitment of stem cells. Naturally occurring growth factors are found within the tissues themselves and are only present in small amounts. Thus, to provide industrially useful and reproducible amounts of human growth factors, traditional technics involve the production of GFs by genetic recombination. These recombinant molecules are typically grafted onto the surface of a biocompatible material and placed, where needed, inside or on the body of a patient.

[0005] Bone

[0006] It is conventionally known that mature osteoblasts are the cells responsible for bone formation and are derived from osteoblast precursors. Differentiation of human bone marrow mesenchymal stem cells and osteoblast precursors is one of the important processes for bone regeneration. Osteoblasts differentiate from mesenchymal stem cells. Mature osteoblasts differentiate from osteoblast precursors and into osteocytes which are non-dividing cells. Upon cell activation osteoblasts begin to secrete some extracellular matrix around themselves. Calcification, i.e., deposition of insoluble calcium salts in the bone matrix, begins a short time after the matrix has been secreted. Upon termination of bone matrix synthesis, osteoblasts either undergo cell death by apoptosis or differentiate into osteocytes or bone lining cells. Mesenchymal stem cells are found in large numbers in the periosteum, the fibrous-like layer on the outside surface of bones, and in the bone marrow. During cellular differentiation of osteoblasts, the developing progenitor cells express the regulatory transcription factor Cbfa1/Runx2. A second important transcription factor required for osteoblastic differentiation is osterix. Osteoprogenitors differentiate under the influence of growth factors. Important growth factors in skeletal differentiation include bone morphogenetic proteins (BMPs), transforming growth factor beta (TGF-β) and fibroblast growth factors (FGFs). Differentiation of osteoblasts is also characterized by the expression of alkaline phosphatase as an early marker of pre-osteoblasts. As a result, acting on the differentiation cycle of mammal bone marrow mesenchymal stem cells and osteoblast precursors may have applications in bone tissue regeneration.

[0007] Osteoporosis

[0008] Osteoporosis is a progressive bone disease that is characterized by a decrease in bone mass and density which can lead to an increased risk of fracture. In osteoporosis, the bone mineral density (BMD) is reduced, bone microarchitecture deteriorates, and the amount and variety of proteins in bone are altered. Osteoporosis is defined by the World Health Organization as a bone mineral density of 2.5 standard deviations or more below the mean peak bone mass (average of young, healthy adults) as measured by dual-energy X-ray absorptiometry; the term “established osteoporosis” includes the presence of a fragility fracture. The treatment of osteoporotic fractures is often hindered by reduced bone healing and higher rates of complications. Studies in osteoporotic animal models revealed delayed callus formation and enchondral ossification, resulting in impaired biomechanical properties of the bone. The cellular sources of fracture healing are mesenchymal stem cells (MSCs). MSCs migrate to the fracture site, where they proliferate and differentiate into osteoblasts upon stimulation with osteoinductive cytokines. Molecular biological alterations of MSCs, such as decreased proliferative capacity, production of collagen I deficient matrix, preferableness of adipogenic differentiation, and impaired osteogenic differentiation have been described in osteoporotic patients. With regards to the osteoinduction of MSCs, key agents are BMPs. Of these, BMP-2 is one of the most potent osteoinductive cytokines which physiologically contributes to the early phase of fracture healing. Beyond that, BMP-2 is already clinically approved for the treatment of distinct fracture entities. The predominant role of BMP-2 in osteoinduction and bone formation led to a scientific quest regarding its involvement in the pathophysiology of osteoporosis. Osteoporotic animal models revealed inconsistent data with regard to BMP-2 expression levels. BMP-2 was found to be overexpressed in the callus of mandibles and down-regulated in MSCs derived from tibial and femoral bone. In humans, genetic polymorphisms in BMP-2 have been identified as risk factors for the development of familial osteoporosis and osteoporotic fractures. All these findings directly link the BMP pathways to osteoporosis. Other studies investigated the therapeutic potential of BMP-2 in osteoporotic animal models. The systemic administration of rhBMP-2 increased the volume of trabecular bone and stimulated bone formation in osteoporotic mice. The local application of adenoviral BMP-2 at the site of injury enhanced callus formation and improved mechanical properties of the healing bone in osteoporotic sheep. Stimulating the differentiation of MSCs and/or inducing growth factor activity, in particular of BMPs, may thus lead to the development of new osteoporosis treatments.

[0009] Cartilage

[0010] Although native chondrocytes offer little assistance to injured articular cartilage, these cells are responsible for the synthesis and turnover of the cartilage extracellular matrix (ECM), which provides an environment of nutrition diffusion for chondrocytes and provides the joint surface with biomechanical competence. Chondrogenic cells arise from pluripotential adult mesenchymal stem cells (MSCs) through a series of differentiation pathways. Subsequently, it was shown that a number of cytokines and transcription factors are involved in chondrocyte maturation and cartilage formation. Chondrogenic differentiation of MSCs is induced by various intrinsic and extrinsic factors. Growth factors play the most important role in this process. They represent a group of biologically active polypeptides produced by the body, which can stimulate cell proliferation, differentiation and maturation. In the hyaline cartilage, growth factors regulate homeostasis and integrity, as well as development. Important growth factors intervening in cartilage regeneration include TGF-β1, TGF-β3, BMP-2, BMP-4, BMP-7 and GDF-5. As a result, acting on the differentiation cycle of mammal mesenchymal stem cells and chondroblast precursors may have applications in cartilage tissue regeneration.

[0011] Muscles

[0012] Skeletal muscle is a highly complex and heterogeneous tissue serving a multitude of functions in the organism. The process of generating muscle-myogenesis-can be divided into several distinct phases. During embryonic myogenesis, mesoderm-derived structures generate the first muscle fibers of the body proper, and in subsequent waves additional fibers are generated along these template fibers. In the perinatal phase, muscle resident myogenic progenitors initially proliferate extensively but, later on, decrease as the number of myonuclei reaches a steady state and myofibrillar protein synthesis peaks. Once the muscle has matured, these progenitors will enter quiescence and henceforth reside within it as satellite cells. Adult skeletal muscle, like all renewing organs, relies on a mechanism that compensates for the turnover of terminally differentiated cells to maintain tissue homeostasis. This type of myogenesis depends on the activation of satellite cells that have the potential to differentiate into new fibers. The most comprehensively studied form of myogenesis takes place when mature muscle is damaged and large cohorts of satellite cells expand mitotically and differentiate to repair the tissue and reestablish homeostasis. Many similarities, such as common transcription factors and signaling molecules, between embryonic myogenesis and regeneration in the mature skeletal musculature have been discovered. It is now generally accepted that satellite cells are closely related to progenitors of somitic origin. The activation of the network of transcription factors that controls skeletal muscle development depends on paracrine factors that are released by adjacent tissues, such as the neural tube, notochord, surface ectoderm and lateral mesoderm. Several secreted factors have been identified that determine the spatial and temporal onset of myogenesis. However, no consensus has been reached as to whether these molecules instruct naive cells (instructive induction), amplify a pool of committed progenitors and/or enable a default differentiation pathway (permissive induction) or primarily prevent programmed cell death of muscle progenitor cells. Sonic hedgehog (SHH) and WNT signaling have been reported to have pivotal roles in the induction of myogenesis. Likewise, other signalling molecules, such as Noggin and bone morphogenetic proteins (BMPs)—which inactivate and activate receptors of the transforming growth factor-β (TGFβ) superfamily, respectively—are known to play an important part in orchestrating the activation of myogenesis. Muscle tissue degenerative diseases or disorders include, but are not limited to, myopathies, muscular atrophy, disuse atrophy, denervation atrophy, muscular dystrophies such as the Duchenne muscular dystrophy (DMD), and the Becker muscular dystrophy (BMD), fibrosis, fibrositis, muscle weakness, fatigue, cramps, fibromyalgia, or chronic muscle pain syndrome.

[0013] Vascular

[0014] The vasculature in the human body forms through two distinct processes: vasculogenesis and angiogenesis. Vasculogenesis is defined as the process of de novo blood vessel formation occurring when endothelial precursor cells (angioblasts) migrate and differentiate into endothelial cells which form the new vessel. These vascular trees are then extended through angiogenesis which is defined as the new vessel formation secondary to proliferation of endothelial cells from pre-existing vessels. Vasculogenesis as well as angiogenesis occur during the embryologic development of the circulatory system but also in the adult organism from circulating endothelial progenitor cells (derivatives of stem cells) able to contribute, albeit to varying degrees, to neovascularization. An example of where these processes can occur in adults is the revascularization following trauma, e.g., after cardiac ischemia. It is known that the ablation of the endothelial progenitor cells (EPCs) in the bone marrow leads to a significant decrease in the vasculature development which would place endothelial progenitor cells as a novel therapeutic target. The differentiation of the EPCs is a consequence of the interplay amongst different signaling molecules such as growth factors. These include FGF, VEGF, PDGF and others. Vascular endothelial growth factor (VEGF) is a signal protein produced by cells that stimulates vasculogenesis and angiogenesis. It is part of the system that restores the oxygen supply to tissues when blood circulation is inadequate. VEGF is a sub-family of growth factors, to be specific, the platelet-derived growth factor family of cystine-knot growth factors. VEGF causes an importantsignaling cascade in endothelial cells. Binding to VEGF receptor-2 (VEGFR-2) starts a tyrosine kinase signaling cascade that stimulates the production of factors that variously stimulate vessel permeability, proliferation/survival, migration and finally differentiation into mature blood vessels. Recent reports have also indicated that different somatic cells (other than the EPCs) could be reprogrammed towards distinct endothelial cell lineages. This somatic reprogramming as well as the stimulation of EPCs differentiation, both represent promising therapeutic targets in regenerative vascular medicine.

[0015] Wound Healing

[0016] Wound healing is a complex and dynamic process of replacing devitalized and missing cellular structures and tissue layers. Upon injury to the skin, a set of complex biochemical events takes place in a closely orchestrated cascade to repair the damage and restore the protective barrier which in the normal skin is formed by the epidermis (outermost layer) and the dermis (inner or deeper layer) which exist in a steady-state equilibrium. The human adult wound healing process can be divided into 4 distinct phases: hemostasis, inflammatory, fibroblastic, and maturation (or remodeling). These phases are initiated and regulated by various secreted factors such as growth factors. In the first phase, the damaged blood vessels are sealed via different substances secreted by the platelets such as the platelet-derived growth factor (PDGF). The second phase corresponds to an inflammatory response which causes the blood vessels to become leaky thus releasing plasma and PMN's into the surrounding tissue. The neutrophils phagocytize debris and microorganisms and provide the first line of defence against infection. The cells macrophages are able to phagocytize bacteria and provide a second line of defence. They also secrete a variety of chemotactic and growth factors such as fibroblast growth factor (FGF), epidermal growth factor (EGF), transforming growth factor beta (TGF β and interleukin-1 (IL-1) which appears to direct the next stages of wound healing. The third phase involves the replacement of dermal and subdermal tissues. The fibroblasts secrete the collagen framework onto which further dermal regeneration occurs. The pericytes which regenerate the outer layers of capillaries and the endothelial cells which produce the lining are involved in the angiogenesis. The keratinocytes are responsible for the epithelialization. In the final stage of epithelializtion, contracture occurs as the keratinocytes differentiate to form the protective outer layer or stratum corneum. The last and 4th phase of wound healing involves remodeling the dermal tissues to produce greater tensile strength. The principle cells involved in this process are the fibroblasts. For a wound to heal successfully, all four phases must occur in the proper sequence and time frame. Many factors can interfere with one or more phases of this process, thus causing improper or impaired wound healing. Recent research has also shown that adult stem cells could be involved in wound healing. In particular hematopoietic progenitor cells (that give rise to mature cells in the blood) may have the ability to de-differentiate back into hematopoietic stem cells and/or trans-differentiate into non-lineage cells, such as fibroblasts. It is thought that the extent of the stem cell involvement in skin wound healing is complex as the epidermis and dermis could be reconstituted by mitotically active stem cells that reside at the apex of rete ridges (basal stem cells or BSC), the bulge of hair follicles (hair follicular stem cell or HFSC), and the papillary dermis (dermal stem cells). Moreover, the bone marrow may also contain stem cells that could play a major role in cutaneous wound healing. Therefore, activating adult stem cells as well as the different cells and growth factors intervening during the four phases of the skin wound healing process, most certainly represents a promising therapeutic target.

[0017] Tissue Closure

[0018] Wound healing not only applies to skin tissue repair but also to the closure of all tissue layers damaged e.g. in an injury or during surgery. For instance, during bone repair surgery, the different layers of tissues incised in order for the surgeon to reach the damaged bone part and repair it would all need to be closed for the overall healing process to occur. The mediation of this complex, “multi-layered” healing process, involves the participation of many different factors such as growth factors.

[0019] Neurons

[0020] For along time, the human nervous system has been considered fixed and incapable or regeneration since neurons do not divide within the central nervous system (CNS). Recently in has been discovered that neural cells can be regenerated from neural stem cells (NSCs). These are self-renewing, multipotent adult stem cells that generate the main phenotype of the nervous system. They undergo asymmetric cell division into two daughter cells, one non-specialized and one specialized. NSCs primarily differentiate into neurons, astrocytes, and oligodendrocytes. NSCs are generated throughout an adult's life via the process of neurogenesis. NSCs can be differentiated to replace lost or injured neurons or in many cases even glial cells. NSCs are stimulated to begin differentiation via exogenous cues from their microenvironment, or the neural stem cell niche. This niche defines a zone in which stem cells are retained after embryonic development for the production of new cells of the nervous system. This continual supply of new neurons and glia then provides the postnatal and adult brain with an added capacity for cellular plasticity. Critical to the maintenance of the stem cell niche are microenvironmental cues and cell-cell interactions that act to balance stem cell quiescence with proliferation and to direct neurogenesis versus gliogenesis lineage decisions. Several proteins like different growth factors are involved in the mechanisms of the neural stem cell niche as well as in the maintenance and growth of the newly formed neurons. These include the BMPs, FGFs, PDGF, VEGF, TGF βBDNF and others. Nerve growth factor (NGF) is a small secreted protein that is important for the growth, maintenance, and survival of certain target neurons (nerve cells). It also functions as a signaling molecule. While “nerve growth factor” refers to a single factor, “nerve growth factors” refers to a family of factors also known as neurotrophins. Other members of the neurotrophin family that are well recognized include Brain-Derived Neurotrophic Factor (BDNF), Neurotrophin-3 (NT-3), and Neurotrophin 4/5 (NT-4/5). NGF is critical for the survival and maintenance of sympathetic and sensory neurons. Without it, these neurons undergo apoptosis. Nerve growth factor causes axonal growth. Studies have shown that it causes also axonal branching and elongation. Several brain diseases are considered to be caused by disorders in the neural stem cell niche and especially in the precise signaling of this microenvironment. Therefore restoring correct growth factor signaling is a promising target for the treatment of brain diseases.

[0021] Eye Retina

[0022] The vertebrate retina is a light-sensitive layer of tissue, lining the inner surface of the eye. Light striking the retina initiates a cascade of chemical and electrical events that ultimately trigger nerve impulses. These are sent to various visual centers of the brain through the fibers of the optic nerve. In vertebrate embryonic development, the retina and the optic nerve originate as outgrowths of the developing brain, so the retina is considered part of the central nervous system (CNS) and is actually brain tissue. Retinal development involves a complex progression of tissue induction, proliferation of retinal progenitor cell (RPC) populations and terminal differentiation of these cells into specific functional types. Growing evidence indicates that several extrinsic cues play a critical role in the retinal cell development. One such extrinsic molecule type, bone morphogenetic protein (BMP), is a member of the transforming growth factor (TGF)-β family of signaling molecules, which are known to regulate a variety of cell functions in the developing nervous system, including neural induction, cell fate determination, apoptosis, and proliferation. BMP-2, -4, and -7 and their receptors (BMPRs) are expressed in the eye during embryogenesis and are essential for multiple aspects of retinal development. There are many inherited and acquired diseases or disorders that may affect the retina like for example the macular degeneration. It is a degenerative disease that usually affects older adults and results in a loss of vision in the center of the visual field (the macula) because of damage to the retina. Age-related macular degeneration is the leading cause of irreversible blindness in North America. Regenerating the retina via the growth factor signaling responsible for its development is thus a significant potential therapeutic target.

[0023] Kidneys

[0024] The kidney is a complex tissue consisting of several different cell types including glomerular podocytes, endothelial cells, mesangial cells, interstitial cells, tubular epithelial cells, and connecting duct cells. These cell types interact to establish a precise cellular environment that functions as an efficient tissue. Kidney diseases are currently a global public health problem, with an incidence that has reached epidemic proportions and continues to climb worldwide. Kidney failure can be associated with chronic kidney disease (CKD), which is a progressive loss in renal function over a period of months or years. Renal fibrosis, the common pathological feature of CKDs, is characterized by excessive accumulation of ECM (extracellular matrix). TGF-β (transforming growth factor-β) and BMP-7 (bone morphogenetic protein-7), two key members in the TGF-β superfamily, play important but diverse roles in CKDs (chronic kidney diseases). Both TGF-β and BMP-7 share similar downstream Smad signalling pathways, but counter-regulate each other to maintain the balance of their biological activities. During renal injury in CKDs, this balance is significantly altered because TGF-β signalling is up-regulated by inducing TGF-β1 and activating Smad3, whereas BMP-7 and its downstream Smad1/5/8 are down-regulated. In the context of renal fibrosis, Smad3 is pathogenic, whereas Smad2 and Smad7 are renoprotective. However, this counter-balancing mechanism is also altered because TGF-β1 induces Smurf2, an ubiquitin E3-ligase, to target Smad7 as well as Smad2 for degradation. Thus overexpression of renal Smad7 restores the balance of TGF-β/Smad signaling and has therapeutic effect on CKDs. It may this be that restoring the BMP-7 signaling is a potential therapeutic target in renal regenerative therapies.

[0025] Ligaments and Tendons

[0026] Tendons and ligaments (T/L) are dense connective tissues of mesodermal origin. They connect and transmit force from muscle to bone and bone to bone, respectively. Both tissues are able to store elastic energy and withstand hightensile forces, on which locomotion is entirely dependent. T/L are predominantly composed of collagen type I fibrils organized in a highly hierarchical manner that is unique for the T/L. Other collagens (types III-VI, XI, XII, XIV, and XV) and various proteoglycans (decorin, cartilage oligomeric matrix protein (COMP), byglican, lumican, fibromodulin, tenascin-C, etc.) are building the remaining T/L substance. The cellular content of T/L is dominated by tendon-specific fibroblasts named tenocytes. During embryonic development, the tendon-specific cells descend from a sub-set of mesenchymal progenitors condensed in the syndetome, a dorsolateral domain of the sclerotome. Moreover, Mesenchymal stem cells (MSCs), multipotent adult cells that give rise to tissues of mesodermal origin, have been shown to generate in vitro T/L progenitor cells. Several tendon injuries result from gradual wear and tear to the tendon from overuse or aging. Tendon healing is a complex and highly-regulated process that is initiated, sustained and eventually terminated by a large number and variety of molecules. Growth factors represent one of the most important molecule families involved in regeneration. The activity of five growth factors has been best characterized during this process: insulin-like growth factor-I (IGF-I), transforming growth factor beta (TGFbeta), vascular endothelial growth factor (VEGF), platelet-derived growth factor (PDGF), and basic fibroblast growth factor (bFGF). Stimulating the differentiation of MSCs and/or inducing growth factor activity thus represent two potentially significant therapeutic targets in T/L regeneration and healing.

[0027] Fertility and Reproduction

[0028] Reproduction (or procreation) is the biological process by which new offspring individual organisms are produced from their parents. Sexual reproduction is a biological process by which organisms create descendants that have a combination of genetic material contributed from two (usually) different members of the species. Fertility is the natural capability to produce offspring. The development and physiological functions of basic structures in the mammalian reproductive system are influenced by the tissue-specific expression of members of different growth factors families like the BMP family. The establishment of the germ line is a fundamental aspect of reproduction. Germ cell determination is induced in epiblast cells by the extraembryonic ectoderm, and is not acquired through the inheritance of preformed germ plasma. There is some strong evidence that BMP-4 and -8b play a central role in determining primordial germ cell (PGC) formation in the embryo. The genes encoding BMP-4 and -8b have overlapping expression in the extraembryonic ectoderm before gastrulation, i.e., before PGCs are seen. Thus, PGC formation requires BMP-4 expression. There is also evidence from knockout mammals that BMP-8b is required for PGC formation. Furthermore, there is increasing evidence that locally produced BMPs play a major role in the differentiation of the pituitary gonadotrope. Restoring the BMPs signaling would thus be an important factor in infertility therapies.

[0029] Hair

[0030] Tissue homeostasis and regeneration are regulated through balancing quiescence and activation of quiescent epithelial stem cells (SCs). Hair follicles (HFs) follow this process. Throughout adult life, they undergo dynamic, synchronized cycles of degeneration (catagen), quiescence (telogen), and regeneration (anagen). During telogen, which can last for months, HFSCs are quiescent and reside within a specialized microenvironment called the bulge. Within this niche, HFSCs surround the hair shaft produced in the previous cycle. Throughout telogen, the base of the bulge, called the secondary hair germ (HG), directly abuts the underlying mesenchymal dermal papillae (DP), a key signaling center for HFSCs. The telogen/anagen transition relies upon DP-HFSC crosstalk to generate the necessary threshold of activating factors. Upon activation, HFSCs in the HG are the first to proliferate and initiate HF regeneration, whereas HFSCs within the bulge become active several days later. As the new HF emerges, the DP stimulus is pushed increasingly further from niche SCs, which return to quiescence. In contrast, throughout anagen, relatively undifferentiated bulge cell progeny along the outer root sheath (ORS) accelerate proliferation as they approach the DP. This fuels a steady production of transiently amplifying matrix cells, which undergo a few divisions while in contact with DP and then terminally differentiate to form the hair and inner root sheath (IRS). At the anagen/catagen transition, matrix cells apoptosis and the DP retracts upward along with the dying/differentiating epithelial strand. As the HF reenters telogen, growth factors from the inner layer of non-SC niche cells and from surrounding dermal tissue impose a threshold, which must be overcome to initiate the next cycle. When cells in the telogen phase are not able to reenter into the anagen phase, hair stop their growth, and conditions such as hair loss emerge. As a result, acting on the differentiation cycle of mammal hair follicle mesenchymal stem cells and precursor cells may have applications in hair follicle tissue regeneration thus preventing hair-loss and activating hair-growth, preventing/treating alopecia areata, alopecia totalis, alopecia universalis, androgenic alopecia (male pattern baldness), telogen effluvium, anagen effluvium or chemotherapy-induced alopecia, but is not limited.

[0031] Skin

[0032] The skin constantly renews itself throughout adult life. Stem cells (SCs) residing in the epidermis ensure the maintenance of adult skin homeostasis, but they also participate in the repair of the epidermis after injuries. The skin protects the body from dehydration, injury and infection. The skin consists of an underlying dermis, separated by a basement membrane from the multilayered overlaying epidermis. The dermis is of mesodermal embryonic origin and contains as adult stem cells fibroblastic mesenchymal stem-cell-like cells. These cells have a multi-lineage differentiation potential, being also able to form adipose tissue or bones. The stratified epidermis is of ectodermal origin and composed of keratinocytes that differentiate to a water-impermeable stratum corneum. The terminally differentiated cells in the epidermis are shed from the skin, necessitating a continuous delivery of newly differentiating cells. The epidermis is completely renewed about every four weeks. Given that the differentiated cells cannot divide anymore, their replacement depends on epidermal stem cells. Skin stem cells are of special interest because they are easily accessible. In recent years, several products said to have a link with skin stem cells have found their way to the cosmetic products market such as AMATOKIN®, a face care product line commercialised by Voss Laboratories and said to stimulate stem cells in the skin, or Dior's CAPTURE® R60/80 XP product line used as anti-wrinkles whose mechanism is said to be based on the protection of the life force of stem cells. As a result, there is thus some potential in acting on the differentiation cycle of mammal skin mesenchymal stem cells and precursor cells with potential applications in skin tissue regeneration thus preventing wrinkles formation and generally improving skin appearance.

[0033] Blood

[0034] Blood is a bodily fluid in animals that delivers necessary substances such as nutrients and oxygen to the cells and transports metabolic waste products away from those cells. When it reaches the lungs, gas exchange occurs wherein carbon dioxide is diffused out of the blood into the alveoli and oxygen is diffused into the blood. This oxygenated blood is pumped to the left hand side of the heart in the pulmonary vein and enters the left atrium. From here it passes through the bicuspid valve, through the ventricle and taken all around the body by the aorta. Blood contains antibodies, nutrients, oxygen and much more to help the body work. In vertebrates, it is composed of blood cells suspended in blood plasma. Plasma, which constitutes 55% of blood fluid, is mostly water (92% by volume), and contains dissipated proteins, glucose, mineral ions, hormones, carbon dioxide (plasma being the main medium for excretory product transportation), and blood cells themselves. Albumin is the main protein in plasma, and it functions to regulate the colloidal osmotic pressure of blood. Hematopoietic stem cells (HSCs) are the blood cells that give rise to all the other blood cells and are derived from the mesoderm. They are located in the red bone marrow, which is contained in the core of most bones. The HSCs give rise to the myeloid lineage (monocytes and macrophages, neutrophils, basophils, eosinophils, erythrocytes, megakaryocytes/platelets, dendritic cells), and to the lymphoid lineages (T-cells, B-cells, NK-cells). The most abundant cells in the vertebrate blood are red blood cells (also called RBSs or erythrocytes). These contain hemoglobin, an iron-containing protein, which facilitates oxygen transport by reversibly binding to this respiratory gas and greatly increasing its solubility in blood. Blood cell degeneration-related diseases, conditions or disorders include, but are not limited to, Anemia, Iron-deficiency anemia, Anemia of chronic disease, Pernicious anemia, Aplastic anemia, Autoimmune hemolytic anemia, Thalassemia, Sickle cell anemia, Polycythemia vera, Vitamin deficiency anemia, Hemolytic anemia, Thrombocytopenia, Idiopathic thrombocytopenic purpura, Heparin-induced thrombocytopenia, Thrombotic thrombocytopenic purpura, Essential thrombocytosis (primary thrombocythemia), Thrombosis, Hemophilia, von Willebrand disease, Hypercoaguable state (hypercoagulable state), Deep venous thrombosis, Disseminated intravascular coagulation (DIC), Thrombocytopenia, Immune Thrombocytopenia (ITP), Drug-induced thrombocytopenia (DITP), Gestational thrombocytopenia, Thrombotic microangiopathies (TMA), Drug-induced thrombotic microangiopathies, Complement-mediated thrombotic microangiopathies, Mixed cryoglobulinemia, Eosinophilia, Eosinopenia, Idiopathic hypereosinophilic syndrome, Antiphospholipid syndrome (Hughes syndrome), Glanzmann's thrombasthenia, Wiskott-Aldrich syndrome (WAS), Leishmania infection, Toxoplasmosis, Hereditary hypogammaglobulinemia, Nonfamilial hypogammaglobulinemia, Leukopenia, Agranulocytosis, Basopenia, Bernard-Soulier syndrome (BSS), Malaria, Sepsis, or Hemolytic uremic syndrome (HUS).

[0035] Adipose Tissue

[0036] Adipose tissue is loose connective tissue composed mostly of adipocytes. In addition to adipocytes, adipose tissue contains the stromal vascular fraction (SVF) of cells including preadipocytes, fibroblasts, vascular endothelial cells and a variety of immune cells (i.e. adipose tissue macrophages (ATMs)). Adipose tissue is derived from preadipocytes. Its main role is to store energy in the form of lipids, although it also cushions and insulates the body. Pre-adipocytes are thought to be undifferentiated fibroblasts that can be stimulated to form adipocytes. The pre-adipocytes originate from mesenchymal stem cells. Areolar connective tissue is composed of adipocytes. The term “lipoblast” is used to describe the precursor of the adult cell. Adipose tissue degeneration-related diseases, conditions or disorders include, but are not limited to, Obesity, Dercum's disease (DD), Multiple symmetric lipomatosis (MSL), Familial multiple lipomatosis (FML), Upodystrophy, Lipedema, or Atherosclerosis.

[0037] Lung

[0038] The lung is the essential respiration organ in many air-breathing animals. In mammals the two lungs are located near the backbone on either side of the heart. Their principal function is to transport oxygen from the atmosphere into the bloodstream, and to release carbon dioxide from the bloodstream into the atmosphere. A large surface area is needed for this exchange of gases, which is accomplished by the mosaic of specialized cells that form millions of tiny, exceptionally thin-walled air sacs called alveoli. Lung cells include, but are not limited to, type I pneumocytes, type II pneumocytes, clara cells and goblet cells. Lung tissue degeneration-related diseases, conditions or disorders include, but are not limited to, Asthma, Chronic obstructive pulmonary disease (COPD), Chronic bronchitis, Emphysema, Cystic fibrosis, Pulmonary edema, Acute respiratory distress syndrome (ARDS), Pneumoconiosis, Interstitial lung disease (ILD), Sarcoidosis, Idiopathic pulmonary fibrosis, Pulmonary embolism (PE), Pulmonary hypertension, Pleural effusion, Pneumothorax, Mesothelioma, Granulomatosis with polyangiitis (GPA), Goodpasture syndrome (GPS), Pulmonary hyperplasia, Infant respiratory distress syndrome (IRDS), Chronic obstructive pulmonary disease (COPD), Silicosis, Sleep Apnea, Severe Acute Respiratory Syndrome (SARS), Pulmonary fibrosis, Primary ciliary dyskinesia (PCD), Pneumoconiosis (Black Lung Disease), Hypersensitivity Pneumonitis, Cryptogenic Organizing Pneumonia (Bronchiolitis Obliterans Organizing Pneumonia (BOOP)), Byssinosis, Bronchopulmonary Dysplasia, Bronchiolitis, Bronchiectasis, Asbestosis, Pertussis, Middle Eastern Respiratory Syndrome (MERS), Pneumonia, Tuberculosis, Bronchitis, Histoplasmosis, Coccidioidomycosis (Cocci), or Acute bronchitis.

[0039] The present invention thus provides compounds, compositions, microenvironments, functionalised bioactive carriers, medical devices, kits, methods and processes for the design, preparation, manufacture and/or formulation of such compounds, compositions, functionalised bioactive carriers, medical devices and kits, and methods and uses thereof for regenerating or recoding mammalian tissues.

### BRIEF DESCRIPTION OF THE DRAWINGS

[0040] FIG. 1 is a diagram representing a fluorescence intensity of certain embodiments of the invention covalently grafted onto a titanium surface.

[0041] FIG. 2 is a diagram showing a proliferation of osteoblast precursors after 48 hours of culture on a native apatite ceramic biomaterial and on a covalently modified apatite ceramic biomaterial according to the present disclosure.

[0042] FIG. 3 is a diagram representing a commitment of human Bone Marrow Mesenchymal Stem Cells towards osteoblast-like cells after 62 hours of culture on titanium biomaterials covalently modified according to the present disclosure using Runx2 and Osterix immunofluorescent stainings.

[0043] FIG. 4 are (a) diagram representing an Optical Profilometry micrograph showing an extracellular matrix (ECM) produced by osteoblast precursors cultured for 24 h on a titanium biomaterial covalently modified according to the present disclosure. (b) Scanning Electron Microscopy showing ECM (collagen fibers) produced by differentiated cells.

[0044] FIG. 5 is a diagram representing a Quantitative Real Time PCR analysis for the expression of Runx2 for cells cultured on a non-modified PEEK biomaterial (control) and on a PEEK biomaterial covalently modified according to the present disclosure, (P<0.001).

[0045] FIG. 6 is a representation of a fluorescence intensity of osteogenic GFR-binding compounds as described herein mixed with type-I collagen or with apatite ceramics substrates. The images represent surfaces non-covalently coated with osteogenic GFR-binding compounds as described herein-FITC.

[0046] FIG. 7 is a representation of a fluorescence intensity of osteogenic GFR-binding compounds as described herein mixed with a type-I collagen substrate after 3, 7 and 10 days (a). The images represent surfaces non-covalently coated with osteogenic GFR-binding compounds as described herein-FITC. (b) is fluorescence intensity of osteogenic GFR-binding compounds-FITC coated on apatite ceramics after incubation in cell culture medium for the indicated times (up to 10 days).

[0047] FIG. 8 is a graph representing the quantification of the proliferation of osteoblast precursors after 48 hours of cell culture on apatite ceramics and on collagen coated with osteogenic GFR-binding compounds as described herein.

[0048] FIG. 9 is a representation of the commitment of human Bone Marrow Mesenchymal Stem Cells towards osteoblast-like cells after 48 hours of culture on collagen and on apatite ceramics coated with osteogenic GFR-binding compounds as described herein using Runx2 and Osterix immunofluorescent stainings (a). (b) is an analysis for Alkaline Phosphatase Activity.

[0049] FIG. 10 is a representation of an immunofluorescent staining of F-actin (green) and Osteopontin (red) for hMSC showing their differentiation into osteoblast cells after 96 hours of culture on a type-I collagen scaffold non-covalently modified with GFR-binding compounds as described herein.

[0050] FIG. 11 is a representation of a Quantitative Real Time PCR analysis of the expression of Runx2 in cells cultured on native type-I collagen and on native type-I collagen scaffold non-covalently modified with various osteogenic GFR-binding compounds as described herein, (P<0.005).

[0051] FIG. 12 is (a) a representation of a quantification of the cell area of hMSCs cultured on a native hydrogel (control) and on a hydrogel covalently modified with chondrocyte GFR-binding compounds as described herein. hMSCs commitment towards chondrocyte differentiation was observed using Sox9 (Transcription factor) immunofluorescent staining. (b) is a representation of a Quantitative Real Time PCR analysis of the expression of the Sox9 gene and a semi-quantitative RT-PCR analysis for the expression of the Aggrecan gene.

[0052] FIG. 13 is a histogram showing the distribution of the endothelial cell adherens junctions size. The results were obtained from immunofluorescence staining with an antibody against CD31 (PECAM1).

[0053] FIG. 14 is confocal images of endothelial cells (ECs) cultured on native polymer and covalently modified polymer. The fluorescence intensities corresponding to CMFDA was represented in gray.

[0054] FIG. 15 is (a) Phase-contrast Micrograph showing the progression of migrating cells after scratching. (b) Mean epithelial cell velocity measured for cells cultured on a native polymer or on a polymer covalently modified with GFR-binding compounds as described herein.

[0055] FIG. 16 is (a) a diagram representing the results of a Quantitative Real Time PCR analysis for the expression of Sox2 in cells cultured on the native hydrogel (control) and on the hydrogel covalently modified with Hair Follicle Stem Cell activation compounds of invention. (b) The total BMP-6 immunofluorescence intensity in the cell culture medium was quantified for Hair Follicle Stem Cells cultured for 96 h.

[0056] FIG. 17 is (a) a quantification of the cell area of hMSCs cultured on native hydrogel (control) and on hydrogel covalently modified with musculogenic GFR-binding compounds as described herein. The average cell area was estimated from approximately 25 cells from 2 different passages. (b) is a Quantitative Real Time PCR analysis for the expression of the COMP gene (Cartilage Oligomeric Matrix Protein, a tendon/ligament lineage gene).

[0057] FIG. 18 is (a) Representative images of neurons cultured on a native polymer and on a covalently modified polymer. Phalloidin and vinculin immunostainings are represented in green and red, respectively. The nucleus was stained with DAPI and is represented in blue. (b) is a diagram representing the results of a Quantitative Real Time PCR analysis of the expression of the Growth Associated Protein 43 (GAP43) gene in cells cultured on the native polymer (PET, control) and on the polymer (PET) covalently modified with neurogenic peptides.

[0058] FIG. 19 is a representation representing the amount of STRO-1 (a hMSC stemness marker) present in the cells expressed as an average fluorescence intensity, normalized by the number of cells.

[0059] FIG. 20 is a screen shot of the Standard Protein Blast online software used in the RMSD calculation procedure.

[0060] FIG. 21 is an overview of the experimental protocol used to demonstrate the effect of several embodiments according to the present disclosure on osteoporosis.

[0061] FIG. 22 is a Histological analysis of coronal sections of the femoral defect site for the “No implantation” condition, 3 weeks (left) and 12 weeks (right) after inducing a critical size defect. 3 types of stainings were performed on the sections: Haematoxylin and Eosin staining (HE) to qualitatively analyze tissue morphology; Tartrate-Resistant Acid Phosphatase (TRAP) staining to highlight the active osteoclasts (red) fraction inside bone tissue (light blue); Von Kossa and Van Gieson (VKVG) staining to highlight mineralized bone tissue (black), non mineralized osteoid tissue (dark pink) and fibrous tissue (light pink). The discontinuous lines on the HE staining indicate the approximate defect site area and the black arrows indicate the defect site entry.

[0062] FIG. 23 is a histological analysis of coronal sections of the femoral defect sites for or representative GFR-binding compound of the present disclosure condition as compared to the Control 2 condition, 3 weeks (A) and 12 weeks (B) after implantation in the critical size induced defect. 3 types of stainings were performed on the sections: Haematoxylin and Eosin staining (HE) to qualitatively analyze tissue morphology; Tartrate-Resistant Acid Phosphatase (TRAP) staining to highlight the active osteoclasts (red) fraction inside bone tissue (light blue); Von Kossa and Van Gieson (VKVG) staining to highlight mineralized bone tissue (black), non mineralized osteoid tissue (dark pink) and fibrous tissue (light pink). The discontinuous lines on the HE staining indicate the approximate defect site area. Light green stars indicate the ceramics. Black residues in the TRAP staining correspond to calcified ceramic crystals.

### DETAILED DESCRIPTION

[0063] Cellular differentiation is the process by which a cell type becomes specialized, and involves a highly controlled switch from one gene expression pattern to another. In each specific lineage, cells progress through various stages of differentiation and maturation. In the case of bone lineage, osteoblast progenitors are derived from adult bone marrow mesenchymal stem cells, followed by osteoblast precursors, mature osteoblasts and osteocytes.

[0064] Mesenchymal stem cells or MSCs are multipotent stromal cells that can differentiate into a variety of cell types including osteoblasts (bone cells), chondrocytes (cartilage cells), neurons, endothelial cells and adipocytes (fat cells). Growth factors generally modulate MSC activity through non-covalent binding to specific receptors called growth factor receptors (GFRs). Growth factors (GF) bind to serine-threonine kinase receptors on the cell surface, triggering specific intracellular pathways that activate and influence gene transcription, having effects in cell proliferation and/or differentiation. There are three or more receptors (types I, II and Ill) for GF members but only types I and II are required for binding and signalling. After binding of signal molecule, receptors are activated which leads into induction of SMAD pathway. Type I receptors phosphorylate receptor-regulated Smads (R-Smads) which form a complex with common-partner Smad (Co-Smad). This complex is translocated into the nucleus and modulates gene transcription with other transcription factors required for chondrogenic differentiation.

[0065] Modulation of such an activity may typically be performed using recombinant growth factors. However, studies indicated that prior attempts using this technology, for instance, in the field of spinal fusion, may be harmful to the patient treated and lead in certain cases to the development of tumors and other serious side-effects. The real clinical advantage over previously employed technics not involving the use of recombinant growth factors may also be questioned.

[0066] Other attempts to induce tissue formation involve the use of synthetic peptides reproducing parts of the natural sequences of growth factors. For example, these synthetic peptides have been studied for their potential use in improving bone repair. However, these peptides generally often lack sufficient biological activity and suffer from poor in-vitro and/or in-vivo stability. Furthermore, the tissue-induction activity of conventional synthetic peptides is not rapid. For example, in-vitro osteogenic differentiation of mesenchymal stem cells cultured on biomaterials using such conventional peptides is generally observed after 3 weeks of cell culture.

[0067] The present invention thus provides embodiments for:
[0068] Modifying and/or enhancing and/or modulating and/or promoting and/or activating tissue regeneration in mammals, preferably humans;
[0069] Modifying and/or enhancing and/or modulating and/or promoting and/or activating bone, and/or cartilage, and/or vascular, and/or neuronal, and/or retinal, and/or organs such as kidneys or lungs, and/or ligament/tendon, and/or hair follicle, and/or skin, and/or blood, and/or adipose, tissue regeneration;
[0070] Modifying and/or enhancing and/or modulating and/or promoting and/or activating embryonic patterning;
[0071] Modifying and/or enhancing and/or modulating and/or promoting and/or activating cellular migration and wound healing;
[0072] Modifying and/or enhancing and/or modulating and/or promoting and/or activating the closure of any type of living tissues;
[0073] Modifying and/or enhancing and/or modulating and/or promoting and/or activating female fertility;
[0074] Preventing and/or suppressing or avoiding or reducing tissue degeneration in mammals, preferably humans;
[0075] Preventing and/or suppressing or avoiding or reducing bone, and/or cartilage, and/or vascular, and/or neuronal, and/or retinal, and/or organs such as kidneys or lungs, and/or ligament/tendon, and/or hair follicle, and/or skin, and/or blood, and/or adipose, tissue degeneration;
[0076] Protecting a subject from a tissue degeneration disease, disorder or condition;
[0077] Protecting a subject from osteoporosis;
[0078] Preventing and/or suppressing or avoiding or reducing cellular immobilization and wound formation and/or progression;
[0079] Preventing and/or suppressing or avoiding or reducing the misclosure of any type of living tissue;
[0080] Preventing and/or suppressing or avoiding or reducing female infertility;
[0081] Preventing and/or suppressing or avoiding or reducing hair-loss;
[0082] Preventing/treating alopecia areata, alopecia totalis, alopecia universalis, androgenic alopecia (male pattern baldness), telogen effluvium, anagen effluvium or chemotherapy-induced alopecia,
[0083] Modifying and/or enhancing and/or modulating and/or promoting and/or activating the osteogenicity, and/or the chondrogenecity, and/or the endothelization and vascularization ability, and/or hair growth ability, and/or the wound healing ability, and/or the skin repair ability, and/or the tissue defect closure ability, and/or the neuroregeneration ability, and/or the ligament/tendon tissue regeneration ability, and/or the female fertility ability, of a bioactive carrier such as a biomaterial which may be useful in the manufacturing of medical devices;
[0084] Modifying and/or enhancing and/or activating anti-aging/anti-wrinkle effects/properties in cosmetic products;
[0085] Modifying and/or enhancing and/or activating hair growth effects/properties in cosmetic products;
[0086] Modifying and/or enhancing and/or modulating and/or promoting and/or inducing and/or activating stem cells, preferably adult stem cells, more preferably mesenchymal stem cells, commitment and/or differentiation in a specific lineage of cells;
[0087] Modifying and/or enhancing and/or modulating and/or promoting and/or inducing and/or activating progenitor cells differentiation and/or maturation;
[0088] Obtaining/producing functional differentiated cells;
[0089] Obtaining/producing differentiated cells with modified and/or improved functionality and/or physiological activity.

[0090] I. Definitions

[0091] Those skilled in the art will recognize, or be able to ascertain using no more than routine experimentation, many equivalents to the specific embodiments in accordance with the invention described herein. The scope of the present invention is not intended to be limited to the present description, but rather is as set forth in the appended claims.

[0092] In the claims, articles such as “a”, “an”, and “the” may mean one or more than one unless indicated to the contrary or otherwise evident from the context. Claims or descriptions that include “or” between one or more members of a group are considered satisfied if one, more than one, or all of the group members are present in, employed in, or otherwise relevant to a given product or process unless indicated to the contrary or otherwise evident from the context. The invention includes embodiments in which exactly one member of the group is present in, employed in, or otherwise relevant to a given product or process. The invention includes embodiments in which more than one, or all of the group members are present in, employed in, or otherwise relevant to a given product or process.

[0093] It is also noted that the term “comprising” is intended to be open and permits but does not require the inclusion of additional elements or steps. When the term “comprising” is used herein, the terms “consisting of”, “consisting essentially of”, “consisting substantially of” and “consisting exclusively of” are thus also encompassed and disclosed.

[0094] As used herein, the term “approximately” or “about,” as applied to one or more values of interest, refers to a value that is similar to a stated reference value. In certain embodiments, the term “approximately” or “about” refers to a range of values that fall within 25%, 20%, 19%, 18%, 17%, 16%, 15%, 14%, 13%, 12%, 11%, 10%, 9%, 8%, 7%, 6%, 5%, 4%, 3%, 2%, 1%, or less in either direction (greater than or less than) of the stated reference value unless otherwise indicated, self-evident or contradictory in context (e.g. except where such number would exceed 100% of a possible value).

[0095] As used herein and unless otherwise indicated or contradictory in context, the term “with” followed by a specific number of amino acids, when used to define a particular peptide, variant or analog thereof, such as in “a peptide with three amino acids”, means that such peptide, variant or analog thereof, contains exclusively the specific number of amino acids specified after this term.

[0096] As used herein and unless otherwise indicated or contradictory in context, the term “Ci-alkyl” is intended to specifically and individually disclose any branched or unbranched radical, moiety or functional group having “i” carbon atom(s).

[0097] The carbon atom content of the various hydrocarbon-containing moieties herein may be indicated by a prefix designating the minimum and maximum number of carbon atoms in the moiety. For example, in certain embodiments, (Ca-Cb)alkyl indicates an alkyl moiety of the integer “a” to the integer “b” carbon atoms, inclusive.

[0098] At various places in the present specification, substituents of compounds of the present disclosure may be disclosed in groups or in ranges. It is specifically intended that the present disclosure include each and every individual sub-combination of the members of such groups and ranges. For example, in certain embodiments, the term “C1-C5 alkyl” is an abbreviation for (and thus is specifically intended to individually disclose) C1-alkyl (i.e. methyl), C2-alkyl (i.e. ethyl), C3-alkyl (i.e. 1-propyl and 2-propyl), C4-alkyl (i.e. 1-butyl, sec-butyl, iso-butyl and tert-butyl), and C5-alkyl (i.e. 1-pentyl, 2-pentyl, 3-pentyl, 2-methyl-1-butyl, 3-methyl-1-butyl, 2-methyl-2-butyl, 3-methyl-2-butyl, 2,2-dimethyl-1-propyl and 1,1-dimethyl-1-propyl).

[0099] As used herein, unless indicated otherwise or contradictory in context, the terms “alkyl” and “(Ca-Cb)alkyl” refer to monovalent hydrocarbon radicals containing the requisite number of carbon atoms as described above, having straight or branched moieties or combinations thereof. As used herein, alkyl groups may be optionally substituted with between one to four substitutes. Non-limiting examples of alkyl groups include, e.g. methyl, ethyl, n-propyl, isopropyl, n-butyl, isobutyl, sec-butyl, t-butyl, etc. Of course, other alkyl groups will be readily apparent to those of skilled in the art given the benefit of the present disclosure.

[0100] Where ranges are given, endpoints are included. Furthermore, it is to be understood that unless otherwise indicated or otherwise evident from the context and understanding of one of ordinary skill in the art, values that are expressed as ranges can assume any specific value or sub-range within the stated ranges in different embodiments of the invention, to the tenth of the unit of the lower limit of the range, unless the context clearly dictates otherwise. For example, in certain embodiments, a disclosed 0-10 range would, for example, in certain embodiments, also specifically and individually disclose the following values and ranges: 0, 1, 2, 3, 4, 5, 6, 7, 8, 9, 10, 0.1, 0.2, 0.3, 0.4, 0.5, 0.6, 0.7, 0.8, 0.9, 1, 1.1, 1.2, 1.3, 1.4, 1.5, 1.6, 1.7, 1.8, 1.9, 2, 2.1, 2.2, 2.3, 2.4, 2.5, 2.6, 2.7, 2.8, 2.9, 3, 3.1, 3.2, 3.3, 3.4, 3.5, 3.6, 3.7, 3.8, 3.9, 4, 4.1, 4.2, 4.3, 4.4, 4.5, 4.6, 4.7, 4.8, 4.9, 5, 5.1, 5.2, 5.3, 5.4, 5.5, 5.6, 5.7, 5.8, 5.9, 6, 6.1, 6.2, 6.3, 6.4, 6.5, 6.6, 6.7, 6.8, 6.9, 7, 7.1, 7.2, 7.3, 7.4, 7.5, 7.6, 7.7, 7.8, 7.9, 8, 8.1, 8.2, 8.3, 8.4, 8.5, 8.6, 8.7, 8.8, 8.9, 9, 9.1, 9.2, 9.3, 9.4, 9.5, 9.6, 9.7, 9.8, 9.9, 10, 0-1, 0-2, 0-3, 0-4, 0-5, 0-6, 0-7, 0-8, 0-9, 1-2, 1-3, 1-4, 1-5, 1-6, 1-7, 1-8, 1-9, 2-3, 2-4, 2-5, 2-6, 2-7, 2-8, 2-9, 2-10, 3-4, 3-5, 3-6, 3-7, 3-8, 3-9, 3-10, 4-5, 4-6, 4-7, 4-8, 4-9, 4-10, 5-6, 5-7, 5-8, 5-9, 5-10, 6-7, 6-8, 6-9, 6-10, 7-8, 7-9, 7-10, 8-9, 8-10, 9-10, 0-0.1, 0-0.2, 0-0.3, 0-0.4, 0-0.5, 0-0.6, 0-0.7, 0-0.8, 0-0.9, 0-1.1, 0-1.2, etc.

[0101] As used herein and unless otherwise indicated or contradictory in context, the term “substantially” refers to the qualitative condition of exhibiting total or near-total extent or degree of a characteristic or property of interest. One of ordinary skill in the biological arts will understand that biological and chemical phenomena rarely, if ever, go to completion and/or proceed to completeness or achieve or avoid an absolute result. The term “substantially” is therefore used herein to capture the potential lack of completeness inherent in many biological and chemical phenomena.

[0102] In addition, it is to be understood that any particular embodiment of the present invention that falls within the prior art may be explicitly excluded from any one or more of the claims using the appropriate disclaimer(s) or proviso(s). Since such embodiments are deemed to be known to one of ordinary skill in the art, they may be excluded even if the exclusion is not set forth explicitly herein. Any particular embodiment of the compositions of the invention (e.g., any nucleic acid or protein encoded thereby; any method of production; any method of use; etc.) can be excluded from any one or more claims, for any reason, whether or not related to the existence of prior art.

[0103] All cited sources, for example, in certain embodiments, references, publications, databases, database entries, and art cited herein, are incorporated into this application by reference in their entirety, even if not expressly stated in the citation. In case of conflicting statements of a cited source and the instant application, the statement in the instant application shall control.

[0104] As the case may be, and unless otherwise indicated or contradictory in context, macromolecules molecular weights should be understood in the present description as being number averaged molecular weights.

[0105] The peptides mentioned in the present description may not follow the usual representation conventions. For instance, the N-terminal amino acid of a peptide sequence may be the first amino acid in the sequence or the last amino acid. Likewise, the C-terminal amino acid of a peptide sequence may be the first amino acid in the sequence or the last amino acid. For example, in the peptide sequence NAIS (SEQ ID NO: 6357), “N” may be N-terminal or C-terminal, and “S” may be N-terminal or C-terminal. Consequently, for the purpose of the present disclosure, e.g. NAIS (SEQ ID NO: 6357) also covers SIAN (SEQ ID NO: 6607), SAIS (SEQ ID NO: 6360) also covers SIAS (SEQ ID NO: 6608), SPIN (SEQ ID NO: 6363) also covers NIPS (SEQ ID NO: 6609), etc.

[0106] In the present application, when reference is made to a certain peptide (e.g. a GFR-binding compound as provided herein) comprising one or more other peptide(s), said one or more other peptide(s) is(are) understood to be stably (in most cases, covalently) attached/bound to at least one part of said peptide. The attachment/binding may be located anywhere on the peptide unless indicated otherwise, contradictory in context or contradictory to general scientific rules. No specific attachment/binding location of said one or more other peptide(s) to said peptide shall be assumed unless specifically mentioned.

[0107] Peptide or polypeptide: As used herein, the term “peptide” or “polypeptide” are used interchangeably and refers to a polymer of less than or equal to 100 amino acids long, e.g., about 4, 5, 10, 15, 20, 25, 30, 35, 40, 45, 50, 55, 60, 65, 70, 75, 80, 85, 90, 95 or 100 amino acids long. The terms apply to amino acid polymers in which one or more amino acid residue is an artificial chemical mimetic of a corresponding naturally occurring amino acid, as well as to naturally occurring amino acid polymers, non-naturally occurring amino acid polymers, peptide analogs, peptide variants and peptide mimetics. Conventional techniques for synthesising peptides involve the activation of the carboxylic acid function of an amino acid or of a peptide, using a coupling agent. This activated acid is then contacted with an amino acid or a peptide in which the N-terminal amino acid is not protected, thus forming an amide bond also called peptide bond. Coupling reaction conditions together with coupling agents are well known in the art and described, for instance, in Greene, “Protective Groups in Organic Synthesis”, Wiley, New York, 2007 4th edition. In addition, suitable peptide synthesis routes are described, for instance, in Hojo H., Recent progress in the chemical synthesis of proteins, Curr Opin Struct Biol. 2014; 26C:16-23 and Saranya Chandrudu, et al., Chemical Methods for Peptide and Protein Production, Molecules, 2013, 18, 4373-4388, each of which is incorporated herein by reference in its entirety. There are two main strategies for peptide synthesis i.e. liquid-phase peptide synthesis and solid-phase peptide synthesis (SPPS) which is now most commonly used for peptide synthesis. Instead of C-terminal protection with a chemical group, the C-terminus of the first amino acid is coupled to an activated solid support, such as polystyrene or polyacrylamide. This type of approach has a two-fold function: the resin acts as the C-terminal protecting group and provides a rapid method to separate the growing peptide product from the different reaction mixtures during synthesis. As with many different biological manufacturing processes, peptide synthesizers have been developed for automation and high-throughput peptide production. SPPS allows the synthesis of natural peptides which are difficult to express in bacteria, the incorporation of unnatural amino acids, peptide/protein backbone modification, and the synthesis of D-proteins, which consist of D-amino acids. Very long peptide can be accessed by using native chemical ligation to couple two peptides together with quantitative yields.

[0108] Peptide analogs: As used herein, unless indicated otherwise or contradictory in context, the term “peptide analogs” refers to polypeptide variants which differ by one or more amino acid alterations, e.g., substitutions, additions or deletions of amino acid residues that still maintain one or more of the properties of the parent or starting peptide.

[0109] Peptide variants: As used herein, unless indicated otherwise or contradictory in context, the term “peptide variants” refers to a peptide which has a certain identity with a native or reference compound sequence. In one example, the peptide variant refers to any post—administration, application, injection modified peptide. Such post—administration, application, injection modifications include, but are not limited to, phosphorylation, acetylation, glutamylation, tyrosination, palmitoylation, glycosylation, myristoylation, palmitoylation, isoprenylation, glypiation, lipoylation, phosphopantetheinylation, acylation, alkylation, amidation, arginylation, polyglutamylation, polyglycylation, butyrylation, gamma-carboxylation, glycosylation, polysialylation, malonylation, hydroxylation, iodination, nucleotide addition, oxidation, adenylylation, propionylation, pyroglutamate formation, S-glutathionylation, S-nitrosylation, succinylation, sulfation, glycation, biotinylation, pegylation, ISGylation, SUMOylation, ubiquitination, Neddylation, Pupylation, citrullination, deamidation, eliminylation, carbamylation, and racemization.

[0110] Peptido-mimetic: As used herein, unless indicated otherwise or contradictory in context, the term “peptido-mimetic” or “peptidomimetic” refers to a synthetic chemical compound which comprises amino acids but not only and that is able to mimic the biological action of a peptide, often because the mimetic has a basic structure that mimics the basic structure of the peptide and/or has the salient biological properties of that peptide. In one particular example, a peptidomimetic is a hybrid molecule containing both, at least one peptide, and at least one of a polysaccharide, a polynucleotide or a linear or branched, saturated or unsaturated, hydrocarbon chain.

[0111] Linear peptide: As used herein, unless indicated otherwise or contradictory in context, the term “linear peptide” means a peptide in which the C-terminal and the N-terminal amino acid residues do not covalently interact with each other and none of the C-terminal or the N-terminal amino acid residues covalently interacts with another amino acid residue of the peptide chain.

[0112] Cyclic peptide: As used herein, unless indicated otherwise or contradictory in context, the term “cyclic peptide” means peptide in which the C-terminal and N-terminal amino acid residues do covalently interact with each other or the C-terminal and/or the N-terminal amino acid residues covalently interact with at least one other amino acid residue of the peptide chain so as to form a ring-like structure.

[0113] Amino acid: As used herein, unless indicated otherwise or contradictory in context, the term “amino acid” refers to naturally occurring and non-naturally occurring amino acids including amino acid analogs. Naturally occurring amino acids are those encoded by the genetic code, as well as those amino acids that are later modified, e.g., hydroxyproline, [gamma]-carboxyglutamate, and O-phosphoserine. Naturally encoded amino acids are the 20 common amino acids glycine (Gly, G), alanine (Ala, A), valine (Val, V), leucine (Leu, L), isoleucine (Ile, I), serine (Ser, S), threonine (Thr, T), phenylalanine (Phe, F), tyrosine (Tyr, Y), tryptophane (Trp, W), cysteine (Cys, C), methionine (Met, M), proline (Pro, P), aspartic acid (Asp, D), asparagine (Asn, N), glutamine (Gln, Q), glutamic acid (Glu, E), histidine (His, H), arginine (Arg, R) et lysine (Lys, K) and pyrrolysine and selenocysteine. Non-naturally occurring amino acids include, but are not limited to, the dextrogyre (D) isomers of the above-cited naturally-occurring amino acids. Amino acid analogs refers to compounds that have the same basic chemical structure as a naturally occurring amino acid i.e., an [alpha] carbon that is bound to a hydrogen, a carboxyl group, an amino group, and an R group (i.e. side chain), and which may be used in replacement thereof without substantially affecting the overall function of the peptide to which it belongs. Amino acid analogs (or non-naturally occurring amino acids) that may be suitable for implementing embodiments of the present invention include, but are not limited to, amino acids comprising a photoactivatable cross-linker, spin-labeled amino acids, fluorescent amino acids, metal binding amino acids, metal-containing amino acids, radioactive amino acids, amino acids with novel functional groups, amino acids that covalently or noncovalently interact with other molecules, photocaged and/or photoisomerizable amino acids, amino acids comprising biotin or a biotin analogue, glycosylated amino acids such as a sugar substituted serine, other carbohydrate modified amino acids, keto-containing amino acids, amino acids comprising polyethylene glycol or polyether, heavy atom substituted amino acids, chemically cleavable and/or photocleavable amino acids, amino acids with an elongated side chains as compared to natural amino acids, including but not limited to, polyethers or long chain hydrocarbons, including but not limited to, greater than about 5 or greater than about 10 carbons, carbon-linked sugar-containing amino acids, redox-active amino acids, amino thioacid containing amino acids, and amino acids comprising one or more toxic moiety. The term “AA¹⁻” (AA roman numeral one) may be used in the description and refers to an amino acid which may be any amino acid as defined above in particular any naturally occurring and non-naturally occurring amino acids.

[0114] Amino acid side chain: As used herein, unless indicated otherwise or contradictory in context, the term “amino acid side chain” means the functional group of an amino acid that differentiates it from other amino acids. All amino acid structures have a carboxyl group, an amine group and a specific side chain.

[0115] AA^{II} (AA roman numeral two): As used herein, unless indicated otherwise or contradictory in context, the terms “polar amino acid” or “AA^{II}” means amino acids having a polar, non-charged group-containing side chain. Polar amino acids are protonated at physiological pH (about 7). Examples of polar amino acids include, but are not limited to, Cys (C), Asn (N), Gln (Q), Ser (S), Thr (T), or Tyr (Y).

[0116] AA^{III} (AA roman numeral three): As used herein, unless indicated otherwise or contradictory in context, the terms “acidic amino acid” or “AA^{III}” means amino acids having an acidic group-containing side chain. Acidic amino acid deprotonated forms predominate at physiological pH (about 7). Examples of acidic amino acids include, but are not limited to, Asn (N) and Glu (E).

[0117] AA^{IV} (AA roman numeral four): As used herein, unless indicated otherwise or contradictory in context, the terms “aliphatic amino acid” or “AA^{IV}” means amino acids having an aliphatic side chain. Examples of aliphatic amino acids include, but are not limited to, Ala (A), Leu (L), Ile (I), Gly (G), Val (V) and any analogs and derivatives thereof.

[0118] AA^{V} (AA roman numeral five): As used herein, unless indicated otherwise or contradictory in context, the terms “apolar amino acid” or “AA^{V}” means amino acids having an apolar side chain. Examples of apolar amino acids include, but are not limited to, Ala (A), Phe (F), Gly (G), Ile (I), Leu (L), Met (M), Pro (P), Val (V) or Trp (W).

[0119] AA^{VI} (AA roman numeral six): As used herein, unless indicated otherwise or contradictory in context, the term “aromatic amino acid” or “AA^{VI}” means amino acids having an aromatic group-containing side chain. Examples of aromatic amino acids include, but are not limited to, Trp (W), Tyr (Y) or Phe (F).

[0120] AA^{VII} (AA roman numeral seven): As used herein, unless indicated otherwise or contradictory in context, the term “basic amino acid” or “AA^{VII}” means amino acids having a basic group-containing side chain. Basic amino acid protonated forms predominate at physiological pH (about 7). Examples of basic amino acids include, but are not limited to, Arg (R), His (H), or Lys (K).

[0121] AA^{VIII} (AA roman numeral eight): As used herein, unless indicated otherwise or contradictory in context, the term “AA^{VIII}” means Leu (L) or Ile (I) and any analogs and derivatives thereof.

[0122] AA^{IX} (AA roman numeral nine): As used herein, unless indicated otherwise or contradictory in context, the term “charged amino acid” or “AA^{IX}” means amino acids having either an acidic group-containing side chain or an basic group-containing side chain. Charged amino acid charged forms predominate at physiological pH (about 7). Examples of charged amino acids include, but are not limited to, Asn (N), Glu (E), His (H), Lys (K) or Arg (R).

[0123] AAⁿ: As used herein, unless indicated otherwise or contradictory in context, the term “AAⁿ”, in which n is a positive integer arbitrarily chosen to identify a specific position within the primary sequence of a peptide. For instance, AA¹³ means the amino acid of position 13. The terms “amino acid” and “AA” are interchangeably used in the present description.

[0124] N-terminal: As used herein, unless indicated otherwise or contradictory in context, the term “N-terminal” means the amine (—NH₂) function/group/moiety located at one (terminal) end of a protein or polypeptide. This functional group is the only amine group which is not engage in n amide peptide bond.

[0125] C-terminal: As used herein, unless indicated otherwise or contradictory in context, the term “C-terminal” means the carboxylate (—CO₂H) function/group/moiety located at one (terminal) end of a protein or polypeptide. This functional group is the only carboxylic acid group which is not engage in n amide peptide bond.

[0126] Naturally-occurring peptide: As used herein, unless indicated otherwise or contradictory in context, the terms “naturally-occurring peptide” or “natural peptide” means a peptide which may be found in nature without human direct intervention (except for its extraction and/or isolation).

[0127] Synthetic peptide: As used herein, unless indicated otherwise or contradictory in context, the terms “synthetic peptide” or “non-natural peptide” means a peptide which may not be found in nature without human direct intervention (except for its extraction and/or isolation). For example, in certain embodiments, a synthetic peptide may have the amino acid sequence of a natural peptide except for at least one amino acid deletion or substitution relative to the natural sequence. In the case of a substitution, an amino acid from the natural sequence is replaced by another, different, naturally-occurring or non-naturally occurring amino acid. For example, in certain embodiments, a synthetic peptide may not possess a post-translational modification of the natural peptide such as the attachment of an acetate group, a phosphate group, a lipid, a carbohydrate, or the formation of a disulfide bridge.

[0128] Covalent Interaction: As used herein, unless indicated otherwise or contradictory in context, the term “interact covalently”, “covalent interaction” or “covalent bond” are interchangeably used and means a chemical bond or interaction that involves the sharing of electron pairs between atoms. Examples of such interactions are σ-bonding and π-bonding.

[0129] Non-covalent Interaction: As used herein, unless indicated otherwise or contradictory in context, the term “interact non-covalently”, “non-covalent interaction” or “non-covalent bond” are interchangeably used and means a chemical bond or interaction that does not involve the sharing of electron pairs between atoms but rather involves more dispersed variations of electromagnetic interactions between molecules or within a molecule. Non-covalent interactions can be generally classified into four categories, electrostatic interactions, π-interactions, van der Waals forces, and hydrophobic interactions.

[0130] Electrophile: As used herein, unless indicated otherwise or contradictory in context, the term “electrophile” means an organic molecule attracted to electrons that participates in a chemical reaction by accepting an electron pair in order to bond to a nucleophile. Most electrophiles are positively charged, have an atom that carries a partial positive charge, or have an atom that does not have an octet of electrons.

[0131] Nucleophile: As used herein, unless indicated otherwise or contradictory in context, the term “nucleophile” means an organic molecule that donates an electron pair to an electrophile to form a chemical bond in relation to a reaction. All molecules or ions with a free pair of electrons or at least one pi bond can act as nucleophiles.

[0132] Polysaccharide: As used herein, unless indicated otherwise or contradictory in context, the term “polysaccharide” means polymeric carbohydrate molecules composed of long chains of monosaccharide units bound together by glycosidic linkages and which upon hydrolysis provide monosaccharides or oligosaccharides. They range in structure from linear to highly branched polymers.

[0133] Polynucleotide: As used herein, the term “polynucleotide” or “nucleic acid”, which are used interchangeably, refers to the phosphate ester polymeric form of ribonucleosides (“RNA molecules”) or deoxyribonucleosides (“DNA molecules”), or any phosphoester analogs thereof, such as phosphorothioates and thioesters, in either single stranded form, or a double-stranded helix. The term “nucleic acid” includes double-stranded DNA round, inter alia, in linear (e.g., restriction fragments) or circular DNA molecules. In particular, nucleic acids as used herein refer to nucleic acids such as RNAs encoding for agonist of growth factor receptors as defined herein.

[0134] Nucleoside: As used herein, the term “nucleoside” refers to a compound containing a sugar molecule (e.g., a pentose or ribose) or derivative thereof in combination with an organic base (e.g., a purine or pyrimidine) or a derivative thereof (also referred to herein as “nucleobase”).

[0135] Nucleotide: As used herein, the term “nucleotide” refers to a nucleoside including a phosphate group.

[0136] Dendrimer: As used herein, unless indicated otherwise or contradictory in context, the term “dendrimer” means any repetitively branched molecules. Examples of dendrimers are phosphorous dendrimers, polylysine dendrimers, polypropylenimine dendrimers and PAMAM dendrimers, such as the ones described, for instance, in Scientific World Journal. 2013; 2013:732340; Curr Opin Chem Biol. 1998; 2(6):733-42; J Pept Sci. 1999; 5(5):203-20; and J Pept Sci. 2008; 14(1):2-43, which may be used for implementing embodiments of the present invention, each of which being herein incorporated by reference in its entirety.

[0137] Synthetic molecule: As used herein, unless indicated otherwise or contradictory in context, the term “synthetic molecule” means a molecule which may not be found in nature without human direct intervention (except for its extraction and/or isolation).

[0138] Synthetic polymers: As used herein, unless indicated otherwise or contradictory in context, the term “synthetic polymer” refers to a macromolecule or polymer which may not be found in nature without human direct intervention (except for its extraction and/or isolation).

[0139] Biocompatible: As used herein, unless indicated otherwise or contradictory in context, the term “biocompatible” means compatible with living cells, tissues, organs or systems posing little to no risk of injury, toxicity or rejection by the immune system.

[0140] Biologically active: As used herein, unless indicated otherwise or contradictory in context, the term “biologically active” refers to a characteristic of any substance that has activity in a biological system and/or organism. For instance, a substance that, when administered to an organism, has a biological effect on that organism, is considered to be biologically active. In particular examples, a compound, substance or pharmaceutical composition of the present disclosure may be considered biologically active even if a portion of the compound, substance or pharmaceutical composition is biologically active or mimics an activity considered biologically relevant.

[0141] Stem cells: As used herein, unless indicated otherwise or contradictory in context, the term “stem cell” refers to the term as it is generally understood in the art. For example, in certain embodiments, stem cells, regardless of their source, are cells that are capable of dividing and renewing themselves for long periods, are at least to a degree unspecialized (undifferentiated), and can give rise to (differentiate into) specialized cell types (i.e., they are progenitor or precursor cells for a variety of different, specialized cell types).

[0142] Mesenchymal stem cells: As used herein, unless indicated otherwise or contradictory in context, the term “mesenchymal stem cells” generally means multipotent adult stromal cells that can differentiate into a variety of cell types, such as osteoblasts, chondrocytes, and adipocytes.

[0143] Stem cell-like: As used herein, unless indicated otherwise or contradictory in context, the term “Stem cell-like” refers to a cell which is not a stem cell by its origin but functions as a stem cell and presents similar characteristics such as, for example, the expression of stemness markers like Stro-1 and/or is multipotent thus has the ability to differentiate into various cell types.

[0144] Progenitor cells: As used herein, unless indicated otherwise or contradictory in context, the term “progenitor cells” generally means a biological cell that, like any stem cell, has a tendency to differentiate into a specific type of cell, but is already more specific than a stem cell and is pushed to differentiate into its “target” cell. Stem cells can generally replicate indefinitely, whereas progenitor cells can divide only a limited number of times.

[0145] Adult stem cells: As used herein, unless indicated otherwise or contradictory in context, the term “adult stem cells” means undifferentiated cells, found throughout the body after development, that multiply by cell division to replenish dying cells and regenerate damaged tissues. Also known as somatic stem cells, they can be found in juvenile as well as adult animals and human bodies.

[0146] Differentiation: As used herein, unless indicated otherwise or contradictory in context, the term “differentiation” refers to the process by which a less specialized cell becomes a more specialized cell type and involves a switch from one gene expression pattern to another.

[0147] Differentiated cells: As used herein, unless indicated otherwise or contradictory in context, the term “differentiated cells” generally means any cell of a specific lineage at the exception of cells containing stem cell specific markers.

[0148] Non-terminally differentiated: As used herein, unless indicated otherwise or contradictory in context, the term “non-terminally differentiated”, when used in relation to a cell, refers to a differentiated cell as defined herein which has not reached its final state of differentiation. For example, in certain embodiments, in the Osteoblast cell lineage, a non-terminally differentiated cell is any differentiated cell of the lineage at the exception of an osteocyte.

[0149] Terminally differentiated: As used herein, unless indicated otherwise or contradictory in context, the term “terminally differentiated”, when used in relation to a cell, refers to a differentiated cell as defined herein which has reached its final state of differentiation. For example, in certain embodiments, in the Osteoblast cell lineage, a terminally differentiated cell is an osteocyte.

[0150] Methods for obtaining stem cells: Methods for obtaining such stem cells and providing initial culture conditions, such as a liquid culture or semi-solid culture medium, are known in the art. The cells are initially expanded in vivo or in vitro, by contacting the source of the stem cells with a suitable reagent that expands or enriches such cells in the tissue source or in culture. Preferably, adult stem cells are isolated from a tissue source and then expanded or enriched in vitro by exposure to a suitable agent. Cells are obtained from an individual by any suitable method for obtaining a cell sample from an animal, including, but not limited, to, collection of bone marrow collection of a bodily fluid (e.g., blood), collection of umbilical cord blood, tissue punch, and tissue dissection, including particularly, but not limited to, any biopsies of skin, intestine, cornea, spinal cord, brain tissue, scalp, stomach, breast, lung (e.g., including lavage and bronchioschopy), fine needle aspirates of the bone marrow, amniotic fluid, placenta and yolk sac.

[0151] Osteogenesis: As used herein, unless indicated otherwise or contradictory in context, the term “osteogenesis” refers to the process by which bone is produced. An entity, molecule, compound, association, combination or composition may be said to be “osteogenic” when it has an effect on the development, growth, or repair of bone. This process involves the participation of stem cells.

[0152] Chondrogenesis: As used herein, unless indicated otherwise or contradictory in context, the term “chondrogenesis” refers to the process by which cartilage is produced. An entity, molecule, compound, association, combination or composition may be said to be “chondrogenic” when it has an effect on the development, growth, or repair of cartilage. This process involves the participation of stem cells.

[0153] Endothelialization: As used herein, unless indicated otherwise or contradictory in context, the term “endothelialization” or “re-endothelialization” refers to the process that maintains or restores normal vascular homeostasis and regulates neointimal hyperplasia. In native tissue, the endothelium maintains vessel integrity with dynamic mechanisms that prevent thrombosis and intimal hyperplasia. The endothelial progenitor cells are an important component of the response to vascular injury, having the potential to accelerate vascular repair through rapid re-endothelialization. For example, drug-eluting stents are generally implanted during angioplasty into patients suffering from atherosclerosis and resulting in stenosis or restenosis. In drug-eluting stents, the drug is typically coated onto a metal alloy framework and is mainly employed to inhibit neointimal growth (due to proliferation of smooth muscle cells) which would cause restenosis. Because much of the neointimal hyperplasia seems to be caused by inflammation, immunosuppressive and antiproliferative drugs are conventionally used. Drugs such as sirolimus and paclitaxel are currently used. Re-endothelialization in drug-eluting stents is generally delayed which can increase the risk for late stent thrombosis which thus may also require the administration of antiplatelet drugs such as Clopidogrel and aspirin.

[0154] Vascularization/angiogenesis: As used herein, unless indicated otherwise or contradictory in context, the term “vascularization/angiogenesis” refers to a physiological process through which new blood vessels are produced from pre-existing vessels. This process involves the participation of stem cells.

[0155] Wound healing: As used herein, unless indicated otherwise or contradictory in context, the term “wound healing” refers to a process whereby the skin (or another organ-tissue) repairs itself after injury. This process involves the participation of stem cells.

[0156] Skin repair: As used herein, unless indicated otherwise or contradictory in context, the term “skin repair” means the reparation of the dermis through the participation of stem cells. These active cells produce collagenous fibers and ground substance. Blood vessels soon grow into the dermis, restoring circulation.

[0157] Neuron-regeneration: As used herein, unless indicated otherwise or contradictory in context, the term “neuron-regeneration” or “neuroregeneration” refers to the regrowth or repair of nervous tissues, cells or cell products involving the participation of stem cells. Such mechanisms may include generation of new neurons, glia, axons, myelin, or synapses.

[0158] Tissue closure: As used herein, unless indicated otherwise or contradictory in context, the term “tissue closure” refers to the closure of all tissue layers damaged e.g. in an injury or during surgery. For instance, during bone repair surgery, the different layers of tissues incised in order for the surgeon to reach the damaged bone part and repair it would all need to be closed for the overall healing process to occur.

[0159] Cell lineage: As used herein, unless indicated otherwise or contradictory in context, the term “cell lineage” refers to the developmental history of a particular cell from its primary state in the fertilized egg or embryo through to its fully differentiated state. The different steps and phases involved in the development of a cell produces many intermediate cells which may be referred to as progenitor or precursor cells in the present application and form an integral part of the cell lineage.

[0160] Osteoblast cell lineage: As used herein, unless indicated otherwise or contradictory in context, the term “osteoblast cell lineage” refers to bone cells at any stage of their development and thus include, but are not limited to, mesenchymal stem cells, osteoblasts, osteocytes or any precursors thereof.

[0161] Chondrocytic cell lineage: As used herein, unless indicated otherwise or contradictory in context, the term “chondrocytic cell lineage” refers to cartilage cells at any stage of their development and thus include, but are not limited to, mesenchymal stem cells,

[0162] Muscle cell lineage: As used herein, unless indicated otherwise or contradictory in context, the term “muscle cell lineage” refers to muscle cells at any stage of their development and thus include, but are not limited to, mesenchymal stem cells, myoblasts, myocytes or any precursors thereof.

[0163] Vascular cell lineage: As used herein, unless indicated otherwise or contradictory in context, the term “vascular cell lineage” refers to vascular cells at any stage of their development and thus include, but are not limited to, mesenchymal stem cells, angioblast, pericytes and endothelial cells or any precursors thereof.

[0164] Neuronal cell lineage: As used herein, unless indicated otherwise or contradictory in context, the term “neuron lineage” refers to brain cells at any stage of their development and thus include, but are not limited to, neural stem cells, neuroblast, neurocyte and neuroglial cells or any precursors thereof.

[0165] Retinal cell lineage: As used herein, unless indicated otherwise or contradictory in context, the term “retinal cell lineage” refers to eye retina cells at any stage of their development and thus include, but are not limited to, photoreceptor, bipolar cells, rod and cone cells or any precursors thereof.

[0166] Renal cell lineage: As used herein, unless indicated otherwise or contradictory in context, the term “renal cell lineage” refers to renal cells at any stage of their development and thus include, but are not limited to, mesenchymal stem cells, podocytes, or any precursors thereof.

[0167] Ligament and tendon cell lineage: As used herein, unless indicated otherwise or contradictory in context, the term “ligament and tendon cell lineage” or “L/T cell lineage” refers to bone or cartilage cells at any stage of their development and thus include, but are not limited to, mesenchymal stem cells, fibroblasts, fibrocytes, or any precursors thereof.

[0168] Fibroblast lineage: As used herein, unless indicated otherwise or contradictory in context, the term “fibroblast lineage” refers to skin cells at any stage of their development and thus include, but are not limited to, mesenchymal stem cells, fibroblasts, keratinocytes, Merkel cells, melanocytes, Langerhans cells, and any precursor cells thereof.

[0169] Reproduction system lineage: As used herein, unless indicated otherwise or contradictory in context, the term “reproduction system lineage” refers to Sertoli cells, Leydig cell and Germ cell at any stage of their development, in particular, mesenchymal stem cells.

[0170] Blood cell lineages (myeloid lineage and lymphoid lineage): As used herein, unless indicated otherwise or contradictory in context, the term “blood cell lineages” refers to blood cells at any stage of their development from the myeloid or from the lymphoid lineage, and thus include, but are not limited to, hematopoietic stem cells (HSC), myeloid progenitors, lymphoid progenitors, mast cells, myeloblasts, monocytes, macrophages, neutrophils, basophils, eosinophils, erythrocytes, megakaryocytes, thrombocytes, dendritic cells, small lymphocytes, T-lymphocytes (T-cells), B-lymphocytes (B-cells), natural killer (NK)-cells, and any precursor cells thereof.

[0171] Adipocyte lineage: As used herein, unless indicated otherwise or contradictory in context, the term “adipocyte cell lineage” refers to adipocyte cells at any stage of their development and thus include, but are not limited to, mesenchymal stem cells, areolar connective cells, adipocytes, pre-adipocytes/lipoblasts, and any precursor cells thereof.

[0172] Lung cell Lineages: As used herein, unless indicated otherwise or contradictory in context, the term “lung cell Lineage” refers to lung cells at any stage of their development and thus include, but are not limited to, epithelial cells, erythrocytes, alveolar cells and any precursor cells thereof.

[0173] Ratio: As used herein, unless indicated otherwise or contradictory in context, the term “ratio”, when used in relation to GFR-binding compound with respect to the bioactive carrier in the pharmaceutical association or composition disclosed herein, refers to the (molar, weight or part as specified) ratio between the quantity of GFR-binding compound and the quantity of bioactive carrier. The ratio may be a molar ratio, a weight ratio or a part ratio and will be specified as needed on a case by case basis. Quantity units may conventionally be mole, millimole, gram, milligram or parts. For example, in certain embodiments, it is convenient to express the relative quantity between GFR-binding compounds and bioactive carriers using densities. It shall be understood that this ratio may be varied according to the cell type to be treated.

[0174] Density: As used herein, unless indicated otherwise or contradictory in context, the term “density”, when used in relation to GFR-binding compound with respect to the bioactive carrier in the pharmaceutical composition disclosed herein, refers to the quantity of GFR-binding compounds, expressed in e.g. mole, millimole, gram, or milligram, with respect to one standardised surface unit e.g. squared millimetre (mm²), squared micrometre (μm²), or squared nanometre (nm²)). For example, in certain embodiments, the ratio between a GFR-binding compound and a bioactive carrier in the pharmaceutical association or composition disclosed herein may be expressed in pmol per mm² or pmol/mm².

[0175] Recoding: As used herein, unless indicated otherwise or contradictory in context, the term “recoding”, when used in relation to a cell (in particular a mesenchymal stem cell or progenitor stem cell), refers to the action of contacting (in-vitro, ex-vivo or in-vivo) a stem cell to be treated with a suitable extracellular micro-environment (e.g. containing a peptide, variant or analog thereof, peptidomimetic, a biomaterial, a medical device, or a medical or cosmetic composition as defined herein) thus providing appropriate extracellular signals so that the cell may undergo efficient differentiation into a more specialised cell type.

[0176] Recoding therapy: As used herein, unless indicated otherwise or contradictory in context, the term “recoding therapy” refers to a therapy that promotes efficient stem cell differentiation in an aim to regenerate mammalian tissues.

[0177] Extracellular micro-environment: As used herein, unless indicated otherwise or contradictory in context, the term “extracellular micro-environment” refers to the environment surrounding (in functional proximity with) a specific stem cell which is characterized by biophysical, mechanical and biochemical properties specific for each tissue and is able to regulate cell behavior. Modification of the extracellular micro-environment of a specific mesenchymal stem cell using, for instance, a peptide, variant or analog thereof, peptidomimetic, a biomaterial, a medical device, or a medical or cosmetic composition as defined herein, allows for the efficient differentiation of this cell into a more specialised cell type.

[0178] Physiologically functional cell: As used herein, unless indicated otherwise or contradictory in context, the term “physiologically functional cell” refers to a cell which is able to perform normally all of the cell functions associated with a particular cell type and necessary for the normal physiology of a cell. These functions include all of the intracellular molecular mechanisms but also all of the activities necessary for a normal communication between the cell and its microenvironment. One method which may be used to verify if a cell is physiologically functional is the grafting of the cell, after the introduction of fluorescent markers, in other mammalian model organisms such as mouse models. The cell is grafted in the tissue corresponding to its cell type. The cell characteristics and normal functions are monitored after a period of time with various methods such as in vivo microscopy or histological staining. The term “functional” when used in relation to a molecule, compound or substance refers to a biological molecule in a form in which it exhibits a property and/or activity by which it is characterized.

[0179] Shorter period of time: As used herein, unless indicated otherwise or contradictory in context, the term “shorter period of time”, when used in relation to differentiation or recoding duration, means substantially shorter to provide a substantial benefit for the treated patient in comparison with existing treatments. In certain embodiments, a shorter period of time includes at least 1.5-fold, at least 2-fold, at least 2.5-fold, at least 3-fold, at least 3.5-fold, at least 4-fold, at least 4.5-fold, at least 5-fold, at least 6-fold, at least 7-fold, at least 8-fold, at least 9-fold or at least 10-fold reduction with respect to an existing treatment.

[0180] Exogenous: As used herein, unless indicated otherwise or contradictory in context, the term “exogenous” refers to a substance coming from outside a living system such as a cell, an organ, or an individual organism. For example, in certain embodiments, exogenous factors in medicine include pathogens and therapeutics. DNA introduced into a cell via transfection or viral infection may be considered as an exogenous factor. Carcinogens are also commonly referred to as exogenous factors.

[0181] Endogenous: As used herein, unless indicated otherwise or contradictory in context, the term “endogenous” refers to substances that originate from within an organism, tissue, or cell.

[0182] Intracellular: As used herein, unless indicated otherwise or contradictory in context, the term “intracellular” generally means “Inside the cell”. In vertebrates, such as animals, the cell membrane is the barrier between the inside of the cell and the outside of the cell (the extracellular milieu). Thus, treatments and therapies in which at least one substance, compound, pharmaceutical association, combination or composition penetrates the cell wall of a cell to be treated in order to produce/deliver its (effective) biological effect are considered as intracellular treatments and therapies.

[0183] Extracellular: As used herein, unless indicated otherwise or contradictory in context, the term “extracellular” means “outside the cell”. In vertebrates, such as animals, the cell membrane is the barrier between the inside of the cell (the intracellular milieu) and the outside of the cell. Thus, treatments and therapies in which no substance, compound, pharmaceutical association, combination or composition requires penetration of the cell membrane in order to produce/deliver its (effective) biological effect (e.g. by interacting with trans-membrane receptors) are considered as extracellular treatments and therapies. In other words, a therapy using a plurality of substances in order to provide the desired biological effect wherein one or more of these substances require the entry into the intracellular compartment to provide (or deliver) its biological effect is not considered as an extracellular therapy in the sense of the present disclosure.

[0184] In vitro: As used herein, unless indicated otherwise or contradictory in context, the term “in vitro” refers to events that occur in an artificial environment, e.g., in a test tube or reaction vessel, in cell culture, in a Petri dish, etc., rather than within an organism (e.g., animal, plant, or microbe).

[0185] In vivo: As used herein, unless indicated otherwise or contradictory in context, the term “in vivo” refers to events that occur within an organism (e.g., animal, plant, or microbe or cell or tissue thereof).

[0186] Ex vivo: As used herein, unless indicated otherwise or contradictory in context, the term “ex vivo” refers to events that occur in an external environment on tissues sourced from an organism (e.g., animal, plant, or microbe) in an attempt to replicate natural living conditions outside such an organism.

[0187] Patient/subject: As used herein, unless indicated otherwise or contradictory in context, the term “patient” or “subject”, which are used interchangeably, refers to any organism to which a composition in accordance with the invention may be administered, e.g., for experimental, diagnostic, prophylactic, and/or therapeutic purposes. Typical subjects include animals (e.g., mammals such as mice, rats, rabbits, non-human primates, and humans) and/or plants. As used herein, patients/subjects include those individuals who may seek or be in need of treatment, requires treatment, is receiving treatment, will receive treatment, or a subject who is under care by a trained professional for a particular disease or condition.

[0188] Purified: As used herein, unless indicated otherwise or contradictory in context, the term “purify,” “purified,” “purification” means to make substantially pure or clear from unwanted components, material defilement, admixture or imperfection.

[0189] Targeted Cells: As used herein, unless indicated otherwise or contradictory in context, the term “targeted cells” refers to any one or more cells of interest. The cells may be found in vitro, in vivo, in situ or in the tissue or organ of an organism. The organism may be an animal, preferably a mammal, more preferably a human and most preferably a patient.

[0190] Molecule length: As used herein, unless indicated otherwise or contradictory in context, the term molecule or peptide “length” or “size” means the longest 2D or 3D distance which may possibly be measured within the molecule. For cyclic molecules, “length” or “size” means the longest measurable distance across the cyclic structure. Throughout the present disclosure, when a molecule size or length is given (in general using the nanometre, nm, unit), the following procedures were used to calculate them:
[0191] The so-called «2D» procedure: a 2D chemical structure was drawn in e.g. the ChemDraw® Software. Then, size measurement was carried out via the available ChemDraw length measurement tools. The length value given herein corresponds to the longest 2D length of the molecule using the default settings 2D bond sizes and angles of the software.
[0192] Alternatively, the so-called “3D” procedure may be followed:
[0193] (1) Drawing of the chemical structure of the molecule using suitable softwares (such as ChemDraw).
[0194] (2) Creating a 3D structure model of the molecule hereby drawn using SCWRL (Protein Sci. 2003; 12(9):2001-14) or MODELLER (Current Protocols in Bioinformatics. 15:5.6:5.6.1-5.6.30), each of which is hereby incorporated by reference in its entirety.
[0195] (3) Incubating the obtained 3D structure model in a box simulation containing water for few milliseconds using AMBER (J. Computat. Chem. 2005; 26, 1668-1688), which is hereby incorporated by reference in its entirety.
[0196] (4) Measuring the size of the molecule hereby obtained using softwares such as Pymol® using available Pymol length measurement tools (DeLano Scientific LLC, www.pymol.org).

[0197] Root Mean Square Deviation: As used herein, unless indicated otherwise or contradictory in context, the term “Root Mean Square Deviation” or “RMSD” is well known in the art and means the square root of the arithmetic mean of the square of the distances between certain matched atoms. One can represent a molecular conformation as a vector whose components are the Cartesian coordinates of the molecule's atoms. Therefore, a conformation for a molecule with N atoms can be represented as a 3N-dimensional vector of real numbers. To calculate the RMSD of a pair of peptides or peptidomimetics (e.g. x and y), each one of them must be represented as a 3N-length (assuming N atoms) vector of coordinates. The RMSD is therefore the square root of the arithmetic mean of the square of the distances between corresponding atoms of x and y. It is a measure of the average atomic displacement between the conformations of the two structures:

$$\sqrt{\frac{1}{N} {\sum }_{i = 1}^{N} \vert xi - yi \vert {1}^{2}}$$

[0198] In other words, the RMSD is the measure of the average distance between the atoms (usually the backbone atoms) of superimposed polypeptides or peptidomimetics. In the study of globular protein conformations, one customarily measures the similarity in three-dimensional structure by the RMSD of the Ca atomic coordinates after optimal rigid body superposition.

[0199] The RMSD value of a given peptide or peptidomimetic with respect to a specifically selected reference structure (hereinafter may also be referred to as “PEPREF”) may be calculated using various methods all well know by the skilled person. However, for the purpose of the present disclosure and for the avoidance of doubts, the RMSD of a given peptide or peptidomimetic as used in the present disclosure is obtained precisely using the following procedure:

[0200] STEP 1: Creating a 3-dimensional model of (i.e. obtaining 3D structure coordinates for) a peptide or peptidomimetic for which the RMSD is to be calculated, by:

[0201] STEP 1.1: Obtaining a set of polypeptide 3D structure coordinates based on the alignment with the sequence of a peptide or peptidomometic for which the RMSD value is to be calculated, using the BLAST algorithm according to the following procedure:
[0202] 1. Open the following link to access the “Standard Protein Blast” tool: blast.ncbi.nlm.nih.gov/Blast.cgi?PROGRAM=blastp&PAGE_TYPE=BlastSearch&LINK_LOC=bla sthome
[0203] 2. Enter the amino acid sequence of the peptide or peptidomimetic of interest in the “Enter Query Sequence” section. The alignment is performed one sequence after the other (this is not a multiple alignment tool).
[0204] 3. In the section “Choose Search Set”, choose the following database: Protein Data Bank Proteins (pdb).
[0205] 4. In the section “Choose Search Set”, do not exclude «Models (XM/XP)» and do not Exclude «Uncultured/environmental sample sequences».
[0206] 5. In the section “Program Selection”, choose the following algorithm: blastp (protein-protein BLAST)
[0207] 6. Leave other fields as shown on the screenshot in FIG. 20.
[0208] 7. Run BLAST.
[0209] 8. The results obtained from the query are presented in the form of several pdb files.
[0210] 9. From this output results, the first ten (10) PDB files corresponding to the best sequence alignments are retained. This set of 10 PDB files or structures will be used in the next step (Step 2: structural alignments with STAMP).
[0211] 10. Finally, clean up the 10 structures contained in the 10 PDB files by removing all e.g. additional small molecules, receptors or portions thereof, dimers or portions thereof, so as to retain only the polypeptide chain of interest.

[0212] The set of pdf files contains the polypeptide 3D structure coordinates of the 10 structures having the highest sequence homology with the peptide or peptidomometic for which the RMSD value is to be calculated.

[0213] STEP 1.2: Performing the structural alignment of the set of 3D structure coordinates obtained in STEP 1.1, thereby obtaining a set of aligned polypeptide 3D structure coordinates, by using STAMP (Structural Alignment of Multiple Proteins Version 4.2) according to the following procedure:
[0214] 1. Open the following link to access the “STAMP superposition” tool: www.russelllab.org/cgi-bin/pdc/stamp.pl
[0215] 2. In the section entitled “Structure A”, input the PDB file corresponding to the first structure from the set of ten 3D structure ccordinates obtained in STEP 1.1, which corresponds to the best sequence alignment with BLAST.
[0216] 3. In the section entitled “Structure B”, input the PDB file corresponding to the second structure from the set of ten 3D structure ccordinates obtained in STEP 1.1, which corresponds to the second best sequence alignment with BLAST.
[0217] 4. Run STAMP.
[0218] 5. Repeat steps 2 to 4 with the other eight pdb files from the set of ten 3D structure coordinates identified in STEP 1.1 by successively entering the PDB files in the field “Structure B”.
[0219] 6. As a result, the structural alignment of the 10 structures contained in the set of PDB files obtained in STEP 1.1 is obtained in the form of 9 distinct PDB files each containing a pair of aligned polypeptide 3D structure (structure 1 with structure 2, structure 1 with structure 3, structure 1 with structure 4, . . . , structure 1 with structure 10).
[0220] 7. From these 9 “pair” PDB files, 10 PDB files each containing one of structures 1 to 10 are created.
[0221] 8. 10 PDB files containing the aligned 3D structure coordinates are thus obtained from STEP 1.2. for use in the next step.

[0222] STEP 1.3: Modelling the sequence of peptide or peptidomometic for which the RMSD value is to be calculated against the set of aligned polypeptide 3D structure coordinates obtained in STEP 1.2, thereby obtaining a set of 3D structure coordinates for the peptide or peptidomometic for which the RMSD value is to be calculated, using SCWRL (reference: “SCWRL and MollDE: computer programs for side-chain conformation prediction and homology modeling”, Nature Protocols VOL3 NO. 12 2008, Qiang Wang et al.; which is hereby incorporated by reference in its entirety) according to the following procedure:
[0223] 1. Insert the input sequence of a peptide or peptidomometic for which the RMSD value is to be calculated in Fasta format.
[0224] 2. Import the first PDB file containing the aligned polypeptide 3D structure coordinates obtained in STEP 1.2.
[0225] 3. Run SCWRL by typing the following command for Unix based systems: “scwrl_path/scwrl3-i inputpdbfile -o outputpdbfile -s sequencefile 4 logfile”.
[0226] 4. As a result, a first PBD file is obtained containing the predicted 3D structure coordinates of the peptide or peptidomometic for which the RMSD value is to be calculated.
[0227] 5. Repeat steps 1 to 3 using the 9 remaining PDB files obtained in STEP 1.2.
[0228] 6. 10 PDB files are obtained from STEP 1.3 for use in the following STEP 1.4.

[0229] STEP 1.4: Minimizing the free energy (ΔG) of the set of 3D structure coordinates for the peptide or peptidomometic for which the RMSD value is to be calculated obtained in STEP 1.3 using GROMACS (Reference: Hess B, Kutzner C, Van Der Spoel D, Lindahl E (2008). “GROMACS 4: Algorithms for Highly Efficient, Load-Balanced, and Scalable Molecular Simulation”. J Chem Theory Comput 4 (2): 435; which is hereby incorporated by reference in its entirety) according to the following procedure:
[0230] 1. Create a Gromacs topology (gmx) file from the first PDB file of the modeled peptide or peptidomometic for which the RMSD value is to be calculated obtained in STEP 1.3, by using the command «pdb2gmx-f NOMDUFICHIERPDB.pdb -water spc». “NOMDUFICHIERPDB” is the name of the input PDB file.
[0231] 2. Create a box around the imported modeled peptide or peptidomometic by using the command «editconf -f conf.gro -bt cubic d 0.7 o box.gro».
[0232] 3. Add solvent (water) molecules into the box by using the command «genbox -cp box.gro -cs spc216.gro -p topol.top-o solvated.gro».
[0233] 4. Prepare the input for the molecular dynamics (MD) run with the command «vim em.mdp». Default run is set to 1000 nsteps.
[0234] 5. Create an input for the MD run by using the command «grompp -f em.mdp -p topol.top -c solvated.gro -o em.tpr».
[0235] 6. Run the command «mdrun-v -deffnm em» to perform the actual energy minimization.
[0236] 7. Run the command «g energy-f em.edr-s em.tpr-o em.xvg» and then run option «7».
[0237] 8. As a result, a first XMG file is obtained. To view the XMG file run the command «xmgrace em.xvg».
[0238] 9. Repeat steps 1 to 8 with the 9 remaining structures obtained in STEP 1.3. 10 XMG files are thus obtained.
[0239] 10. The structure of lowest energy is obtained from each XMG file in the form of a PDB file. 10 PDB files each containing one structure of lowest energy are thus obtained from STEP 1.4 for use in the next step.

[0240] STEP 2: Calculating the RMSD of the peptide or peptidomimetic for which the RMSD value is to be calculated by comparing the 3D structure coordinates of the peptide or peptidomimetic obtained in STEP 1.4 with the 3D structure coordinates of PEPREF to obtain the lowest possible RMSD value using FATCAT (Flexible structure AlignmenT by Chaining Aligned fragment pairs allowing Twists) according to the following procedure:
[0241] 1. Open the following link to access the “FATCAT” software: fatcat.burnham.org
[0242] 2. Open the “pairwise alignment” tool.
[0243] 3. Import the PDB file containing the structure coordinates of PEPREF in the “Get the 1st structure” section.
[0244] 4. Import the first PDB file of the peptide or peptidomimetic for which the RMSD value is to be calculated with minimized energy obtained in STEP 1.4.
[0245] 5. Run FATCAT.
[0246] 6. As a result, a first RMSD value of the first structure of the peptide or peptidomimetic for which the RMSD value is to be calculated as obtained in STEP 1.4 will be obtained in the output report.
[0247] 7. Repeat steps 1 to 5 with the 9 remaining structures (PDB files) obtained from STEP 1.4.
[0248] 8. The peptide or peptidomimetic structure with the lowest RMSD (out of the ten RMSD values successively obtained) is the value taken into account in the present application to select peptides or peptidomimetics having cell differentiation and tissue regeneration capabilities.

[0249] 3D structure coordinates of PEPREF: As used herein, unless indicated otherwise or contradictory in context, the 3D structure coordinates of PEPREF are as follows:

| | | | | | | | | |
|---|---|---|---|---|---|---|---|---|
| ATOM | 511 | N | LYS | A | 1 | −14.570 | 46.437 | 27.424 |
| ATOM | 512 | CA | LYS | A | 1 | −13.512 | 45.748 | 28.151 |
| ATOM | 513 | C | LYS | A | 1 | −13.655 | 44.259 | 27.884 |
| ATOM | 514 | O | LYS | A | 1 | −12.769 | 43.463 | 28.197 |
| ATOM | 515 | CB | LYS | A | 1 | −13.605 | 46.029 | 29.652 |
| ATOM | 516 | CG | LYS | A | 1 | −13.640 | 47.509 | 29.991 |
| ATOM | 517 | CD | LYS | A | 1 | −12.615 | 48.297 | 29.183 |
| ATOM | 518 | CE | LYS | A | 1 | −12.625 | 49.768 | 29.575 |
| ATOM | 519 | NZ | LYS | A | 1 | −13.994 | 50.369 | 29.497 |
| ATOM | 520 | N | ILE | A | 2 | −14.792 | 43.890 | 27.309 |
| ATOM | 521 | CA | ILE | A | 2 | −15.051 | 42.499 | 26.967 |
| ATOM | 522 | C | ILE | A | 2 | −14.911 | 42.370 | 25.444 |
| ATOM | 523 | O | ILE | A | 2 | −15.531 | 43.125 | 24.683 |
| ATOM | 524 | CB | ILE | A | 2 | −16.466 | 42.065 | 27.401 |
| ATOM | 525 | CG1 | ILE | A | 2 | −16.630 | 42.238 | 28.915 |
| ATOM | 526 | CG2 | ILE | A | 2 | −16.710 | 40.629 | 26.985 |
| ATOM | 527 | CD1 | ILE | A | 2 | −15.631 | 41.478 | 29.30 |
| ATOM | 528 | N | PRO | A | 3 | −14.085 | 41.411 | 24.989 |
| ATOM | 529 | CA | PRO | A | 3 | −13.789 | 41.109 | 23.588 |
| ATOM | 530 | C | PRO | A | 3 | −14.998 | 40.695 | 22.768 |
| ATOM | 531 | O | PRO | A | 3 | −15.969 | 40.164 | 23.305 |
| ATOM | 532 | CB | PRO | A | 3 | −12.785 | 39.968 | 23.688 |
| ATOM | 533 | CG | PRO | A | 3 | −12.156 | 40.166 | 25.007 |
| ATOM | 534 | CD | PRO | A | 3 | −13.330 | 40.506 | 25.867 |
| ATOM | 535 | N | LYS | A | 4 | −14.937 | 40.937 | 21.463 |
| ATOM | 536 | CA | LYS | A | 4 | −16.023 | 40.529 | 20.590 |
| ATOM | 537 | C | LYS | A | 4 | −15.886 | 39.015 | 20.391 |
| ATOM | 538 | O | LYS | A | 4 | −14.903 | 38.415 | 20.831 |
| ATOM | 539 | CB | LYS | A | 4 | −15.926 | 41.244 | 19.245 |
| ATOM | 540 | CG | LYS | A | 4 | −15.802 | 42.751 | 19.355 |
| ATOM | 541 | CD | LYS | A | 4 | −16.292 | 43.433 | 18.083 |
| ATOM | 542 | CE | LYS | A | 4 | −16.162 | 44.943 | 18.177 |
| ATOM | 543 | NZ | LYS | A | 4 | −16.825 | 45.628 | 17.019 |
| ATOM | 544 | N | ALA | A | 5 | −16.85 | 38.393 | 19.759 |
| ATOM | 545 | CA | ALA | A | 5 | −16.811 | 36.955 | 19.507 |
| ATOM | 546 | C | ALA | A | 5 | −15.772 | 36.771 | 18.416 |
| ATOM | 547 | O | ALA | A | 5 | −15.727 | 37.534 | 17.455 |
| ATOM | 548 | CB | ALA | A | 5 | −18.168 | 36.419 | 19.043 |
| ATOM | 549 | N | CYS | A | 6 | −14.935 | 35.756 | 18.562 |
| ATOM | 550 | CA | CYS | A | 6 | −13.887 | 35.518 | 17.584 |
| ATOM | 551 | C | CYS | A | 6 | −14.347 | 34.765 | 16.338 |
| ATOM | 552 | O | CYS | A | 6 | −15.327 | 34.018 | 16.368 |
| ATOM | 553 | CB | CYS | A | 6 | −12.743 | 34.768 | 18.241 |
| ATOM | 554 | SG | CYS | A | 6 | −11.198 | 34.959 | 17.353 |
| ATOM | 555 | N | CYS | A | 7 | −13.623 | 34.973 | 15.243 |
| ATOM | 556 | CA | CYS | A | 7 | −13.931 | 34.328 | 13.969 |
| ATOM | 557 | C | CYS | A | 7 | −13.091 | 33.071 | 13.798 |
| ATOM | 558 | O | CYS | A | 7 | −11.961 | 33.123 | 13.302 |
| ATOM | 559 | CB | CYS | A | 7 | −13.653 | 35.290 | 12.824 |
| ATOM | 560 | SG | CYS | A | 7 | −13.930 | 34.633 | 11.154 |
| ATOM | 561 | N | VAL | A | 8 | −13.654 | 31.941 | 14.209 |
| ATOM | 562 | CA | VAL | A | 8 | −12.949 | 30.684 | 14.110 |
| ATOM | 563 | C | VAL | A | 8 | −13.653 | 29.733 | 13.157 |
| ATOM | 564 | O | VAL | A | 8 | −14.759 | 30.016 | 12.687 |
| ATOM | 565 | CB | VAL | A | 8 | −12.814 | 30.038 | 15.492 |
| ATOM | 566 | CG1 | VAL | A | 8 | −11.807 | 30.825 | 16.337 |
| ATOM | 567 | CG2 | VAL | A | 8 | −14.161 | 30.006 | 16.170 |
| ATOM | 568 | N | PRO | A | 9 | −13.003 | 28.601 | 12.828 |
| ATOM | 569 | CA | PRO | A | 9 | −13.593 | 27.615 | 11.918 |
| ATOM | 570 | C | PRO | A | 9 | −14.726 | 26.886 | 12.631 |
| ATOM | 571 | O | PRO | A | 9 | −14.581 | 26.476 | 13.780 |
| ATOM | 572 | CB | PRO | A | 9 | −12.423 | 26.676 | 11.601 |
| ATOM | 573 | CG | PRO | A | 9 | −11.204 | 27.487 | 11.925 |
| ATOM | 574 | CD | PRO | A | 9 | −11.620 | 28.226 | 13.163 |
| ATOM | 575 | N | THR | A | 10 | −15.847 | 26.721 | 11.942 |
| ATOM | 576 | CA | THR | A | 10 | −16.999 | 26.060 | 12.527 |
| ATOM | 577 | C | THR | A | 10 | −17.334 | 24.767 | 11.804 |
| ATOM | 578 | O | THR | A | 10 | −18.097 | 23.943 | 12.303 |
| ATOM | 579 | CB | THR | A | 10 | −18.211 | 27.010 | 12.523 |
| ATOM | 580 | OG1 | THR | A | 10 | −18.491 | 27.445 | 11.185 |
| ATOM | 581 | CG2 | THR | A | 10 | −17.902 | 28.230 | 13.375 |
| ATOM | 582 | N | GLU | A | 11 | −16.750 | 24.586 | 10.627 |
| ATOM | 583 | CA | GLU | A | 11 | −16.980 | 23.377 | 9.848 |
| ATOM | 584 | C | GLU | A | 11 | −15.643 | 22.935 | 9.246 |
| ATOM | 585 | O | GLU | A | 11 | −15.029 | 23.666 | 8.464 |
| ATOM | 586 | CB | GLU | A | 11 | −17.981 | 23.624 | 8.715 |
| ATOM | 587 | CG | GLU | A | 11 | −19.421 | 23.807 | 9.163 |
| ATOM | 588 | CD | GLU | A | 11 | −19.686 | 25.166 | 9.770 |
| ATOM | 589 | OE1 | GLU | A | 11 | −19.478 | 26.175 | 9.073 |
| ATOM | 590 | OE2 | GLU | A | 11 | −20.111 | 25.227 | 10.939 |
| ATOM | 591 | N | LEU | A | 12 | −15.183 | 21.749 | 9.622 |
| ATOM | 592 | CA | LEU | A | 12 | −13.923 | 21.254 | 9.104 |
| ATOM | 593 | C | LEU | A | 12 | −14.062 | 19.912 | 8.386 |
| ATOM | 594 | O | LEU | A | 12 | −15.136 | 19.299 | 8.359 |
| ATOM | 595 | CB | LEU | A | 12 | −12.893 | 21.144 | 10.230 |
| ATOM | 596 | CG | LEU | A | 12 | −12.660 | 22.422 | 11.054 |
| ATOM | 597 | CD1 | LEU | A | 12 | −13.475 | 22.350 | 12.337 |
| ATOM | 598 | CD2 | LEU | A | 12 | −11.181 | 22.586 | 11.399 |
| ATOM | 599 | N | SER | A | 13 | −12.971 | 19.476 | 7.771 |
| ATOM | 600 | CA | SER | A | 13 | −12.964 | 18.218 | 7.046 |
| ATOM | 601 | C | SER | A | 13 | −11.568 | 17.628 | 7.164 |
| ATOM | 602 | O | SER | A | 13 | −10.613 | 18.320 | 7.550 |
| ATOM | 603 | CB | SER | A | 13 | −13.346 | 18.435 | 5.578 |
| ATOM | 604 | OG | SER | A | 13 | −12.404 | 19.261 | 4.923 |
| ATOM | 605 | N | ALA | A | 13 | −11.449 | 16.352 | 6.818 |
| ATOM | 606 | CA | ALA | A | 13 | −10.179 | 15.665 | 6.949 |
| ATOM | 607 | C | ALA | A | 13 | −9.421 | 15.471 | 5.652 |
| ATOM | 608 | O | ALA | A | 13 | −9.941 | 15.720 | 4.563 |
| ATOM | 609 | CB | ALA | A | 13 | −10.413 | 14.306 | 7.626 |
| ATOM | 610 | N | ILE | A | 14 | −8.171 | 15.046 | 5.783 |
| ATOM | 611 | CA | ILE | A | 14 | −7.343 | 14.746 | 4.623 |
| ATOM | 612 | C | ILE | A | 14 | −6.475 | 13.559 | 5.004 |
| ATOM | 613 | O | ILE | A | 14 | −6.212 | 13.316 | 6.183 |
| ATOM | 614 | CB | ILE | A | 14 | −6.401 | 15.916 | 4.183 |
| ATOM | 615 | CG1 | ILE | A | 14 | −5.284 | 16.106 | 5.200 |
| ATOM | 616 | CG2 | ILE | A | 14 | −7.188 | 17.211 | 3.982 |
| ATOM | 617 | CD1 | ILE | A | 14 | −4.173 | 16.973 | 4.696 |
| ATOM | 618 | N | SER | A | 15 | −6.045 | 12.806 | 3.999 |
| ATOM | 619 | CA | SER | A | 15 | −5.187 | 11.662 | 4.242 |
| ATOM | 620 | C | SER | A | 15 | −3.740 | 12.089 | 4.217 |
| ATOM | 621 | O | SER | A | 15 | −3.360 | 13.020 | 3.508 |
| ATOM | 622 | CB | SER | A | 15 | −5.416 | 10.584 | 3.185 |
| ATOM | 623 | OG | SER | A | 15 | −6.667 | 9.971 | 3.401 |
| ATOM | 624 | N | MET | A | 16 | −2.933 | 11.409 | 5.012 |
| ATOM | 625 | CA | MET | A | 16 | −1.518 | 11.700 | 5.047 |
| ATOM | 626 | C | MET | A | 16 | −0.778 | 10.414 | 5.244 |
| ATOM | 627 | O | MET | A | 16 | −1.137 | 9.594 | 6.078 |
| ATOM | 628 | CB | MET | A | 16 | −1.170 | 12.694 | 6.164 |
| ATOM | 629 | CG | MET | A | 16 | −1.848 | 14.042 | 5.974 |
| ATOM | 630 | SD | MET | A | 16 | −1.017 | 15.431 | 6.760 |
| ATOM | 631 | CE | MET | A | 16 | −0.799 | 14.823 | 8.475 |
| ATOM | 632 | N | LEU | A | 17 | 0.238 | 10.231 | 4.426 |
| ATOM | 633 | CA | LEU | A | 17 | 1.077 | 9.065 | 4.508 |
| ATOM | 634 | C | LEU | A | 17 | 2.289 | 9.610 | 5.264 |
| ATOM | 635 | O | LEU | A | 17 | 2.939 | 10.565 | 4.818 |
| ATOM | 636 | CB | LEU | A | 17 | 1.461 | 8.608 | 3.100 |
| ATOM | 637 | CG | LEU | A | 17 | 2.324 | 7.355 | 2.955 |
| ATOM | 638 | CD1 | LEU | A | 17 | 1.553 | 6.145 | 3.445 |
| ATOM | 639 | CD2 | LEU | A | 17 | 2.723 | 7.190 | 1.492 |
| ATOM | 640 | N | TYR | A | 18 | 2.581 | 9.029 | 6.418 |
| ATOM | 641 | CA | TYR | A | 18 | 3.706 | 9.501 | 7.196 |
| ATOM | 642 | C | TYR | A | 18 | 4.434 | 8.333 | 7.835 |
| ATOM | 643 | O | TYR | A | 18 | 4.081 | 7.186 | 7.603 |
| ATOM | 644 | CB | TYR | A | 18 | 3.222 | 10.458 | 8.281 |
| ATOM | 645 | CG | TYR | A | 18 | 2.386 | 9.782 | 9.346 |
| ATOM | 646 | CD1 | TYR | A | 18 | 1.029 | 9.527 | 9.147 |
| ATOM | 647 | CD2 | TYR | A | 18 | 2.961 | 9.379 | 10.550 |
| ATOM | 648 | CE1 | TYR | A | 18 | 0.273 | 8.894 | 10.128 |
| ATOM | 649 | CE2 | TYR | A | 18 | 2.218 | 8.745 | 11.526 |
| ATOM | 650 | CZ | TYR | A | 18 | 0.877 | 8.508 | 11.317 |
| ATOM | 651 | OH | TYR | A | 18 | 0.134 | 7.922 | 12.318 |
| ATOM | 652 | N | LEU | A | 19 | 5.439 | 8.651 | 8.650 |
| ATOM | 653 | CA | LEU | A | 19 | 6.255 | 7.661 | 9.347 |
| ATOM | 654 | C | LEU | A | 19 | 6.210 | 7.946 | 10.847 |
| ATOM | 655 | O | LEU | A | 19 | 6.685 | 8.992 | 11.288 |
| ATOM | 656 | CB | LEU | A | 19 | 7.701 | 7.763 | 8.871 |
| ATOM | 657 | CG | LEU | A | 19 | 7.901 | 7.850 | 7.359 |
| ATOM | 658 | CD1 | LEU | A | 19 | 9.300 | 8.379 | 7.039 |
| ATOM | 659 | CD2 | LEU | A | 19 | 7.669 | 6.482 | 6.748 |

[0250] Structure coordinates: As used herein, unless indicated otherwise or contradictory in context, the “structure coordinates” refers to Cartesian coordinates derived from mathematical equations related to the patterns obtained on diffraction of a monochromatic beam of X-rays by the atoms (scattering centers) of a protein, protein complex or peptide in crystal form. The diffraction data are used to calculate an electron density map of the repeating unit of the crystal. The electron density maps are then used to establish the positions of the individual atoms of the molecule or molecular complex.

[0251] STAMP: STAMP (Structural Alignment of Multiple Proteins) is a tool for aligning protein sequences based on a three-dimensional structure. Its algorithm minimizes the Ca distance between aligned residues of each molecule by applying globally optimal rigid-body rotations and translations. This program provides some information on the equivalence of the residues between the selected models.

[0252] SCWRL: This program predicts and optimizes the protein side-chain conformations. It is using the backbone of a support protein and a backbone-dependent rotamer library. The possible conformations are explored by minimizing the steric hindrance between the side-chains and between the side-chains and the backbone.

[0253] GROMACS: GROMACS is a molecular dynamics package. The “gmx rms” tool included in GROMACS compares two structures by computing the root mean square deviation (RMSD).

[0254] II. Growth Factor Receptor-Binding Compounds

[0255] In one aspect, the present disclosure provides for growth factor receptor-binding compounds having the ability to induce stem cell differentiation and promote tissue regeneration.

[0256] As used herein, the term “growth factor receptor-binding compound”, “GFR-binding compound” or “GFRBC” refers to an exogenous or endogenous compound, molecule or substance having an (binding) affinity for a growth factor receptor as defined herein, and optionally comprising the ability to associate or combine with a bioactive carrier as defined herein.

[0257] There are many ways to test, measure and present the binding affinity of a given substance for a given receptor, but for the purpose of the present disclosure, and for the avoidance of any doubts, the (binding) affinity values of a given GFR-binding compound to a given GFR are provided using the method of fluorescence anisotropy. In this method, a GFR-binding compound is fluorescently labelled using technics well established in the art. Binding of the resulting labelled compound to a growth factor receptor results in a fluctuation of fluorescence anisotropy which is used to construct an affinity binding curve from which the GFR-binding compound binding affinity value is derived. Using this technique, binding affinity values are given in the form of dissociation constants Kd. In certain embodiments, GFR-binding compounds of the present disclosure have Kd values as measured by fluorescence anisotropy of more than 1 (one) picomolar (pM). In certain embodiments, GFR-binding compounds of the present disclosure have Kd values as measured by fluorescence anisotropy of more than 1 (one) nanomolar (nM). In certain embodiments, GFR-binding compounds of the present disclosure have Kd values as measured by fluorescence anisotropy of more than 10 (ten) nanomolar (nM). In certain embodiments, GFR-binding compounds of the present disclosure have Kd values as measured by fluorescence anisotropy of more than 100 (one hundred) nanomolar (nM). In certain embodiments, GFR-binding compounds of the present disclosure have Kd values as measured by fluorescence anisotropy of more than 1 (one) micromolar (μM). In certain embodiments, GFR-binding compounds of the present disclosure have Kd values as measured by fluorescence anisotropy of more than 10 (ten) micromolar (μM). In certain embodiments, GFR-binding compounds of the present disclosure have Kd values as measured by fluorescence anisotropy of more than 100 (one hundred) micromolar (μM).

[0258] A GFR-binding compound is said to possess the ability to associate or combine with a bioactive carrier if it comprises a functional chemical element, function or group allowing for the covalent or non-covalent assembly of the GFR-binding compound and the bioactive carrier. Such a functional chemical element, function or group, also referred to as a bioactive carrier-affinity-containing group or bioactive carrier-high-affinity-containing group, include, but is not limited to, a thiol-containing compound, a cysteine-containing compound, a cysteine, or a GTPGP (SEQ ID NO: 6610) or a WWFWG (SEQ ID NO: 6611) peptide fragment.

[0259] Growth factor receptor: As used herein, unless indicated otherwise or contradictory in context, the term “growth factor receptor” or “GFR” is a receptor which binds to growth factors which are naturally occurring substances capable of stimulating, for instance, cellular growth, proliferation, healing, and cellular differentiation. Suitable as growth factor receptors for implementing embodiments of the present invention include epidermal growth factor receptors (EGFR), fibroblast growth factor receptors (FGFR), vascular endothelial growth factor receptors (VEGFR), nerve growth factor receptors (NGFR), Insulin receptor family, Trk receptor family, Eph receptor family, AXL receptor family, LTK receptor family, TIE receptor family, ROR receptor family, DDR receptor family, RET receptor family, KLG receptor family, RYK receptor family, MuSK receptor family, hepatocyte growth factor receptors (HGFR), somatomedin or insulin-like growth factor receptors (SGFR), platelet-derived growth factor receptors (PDGFR), transforming growth factor beta (TGF-β) superfamily proteins such as AMH, ARTN, BMP10, BMP15, BMP2, BMP3, BMP4, BMP5, BMP6, BMP7, BMP8A, BMP8B, GDF1, GDF10, GDF11, GDF15, GDF2, GDF3, GDF3A, GDF5, GDF6, GDF7, GDF8, GDF9, GDNF, INHA, INHBA, INHBB, INHBC, INHBE, LEFTY1, LEFTY2, MSTN, NODAL, NRTN, PSPN, TGFB1, TGFB2 and TGFB3, and any combination thereof.

[0260] Growth factor: As used herein, unless indicated otherwise or contradictory in context, the term “growth factor” refers to any substance(s) having the ability to bind to a growth factor receptor and produce (a) biological effect(s) or reaction(s), such as promoting the growth of tissues, by activating such a growth factor receptor. Exemplary growth factors include, but are not limited to, platelet-derived growth factor (PDGF), platelet-derived angiogenesis factor (PDAF), vascular endotheial growth factor (VEGF), platelet-derived epidermal growth factor (PDEGF), transforming growth factor beta (TGF-β), transforming growth factor A (TGF-A), epidermal growth factor (EGF), fibroblast growth factor (FGF), acidic fibroblast growth factor (FGF-A), basic fibroblast growth factor (FGF-B), insulin-like growth factors 1 and 2 (IGF-1 and IGF-2), keratinocyte growth factor (KGF), tumor necrosis factor (TNF), fibroblast growth factor (FGF) and interleukin-1 (IL-1), Keratinocyte Growth Factor-2 (KGF-2), and combinations thereof.

[0261] Activation of growth factor receptors: As used herein, unless indicated otherwise or contradictory in context, the term “activating” or “activation of”, when used in relation to a growth factor receptor, refers to the phosphorylation of the tyrosine kinase domain of such a growth factor receptor.

[0262] In one aspect, the present disclosure provides a GFR-binding compound having mesenchymal stem cell and progenitor cell commitment and/or differentiation and/or maturation capacities resulting in tissue regeneration.

[0263] In one example, said GFR-binding compound has a molecular weight of less than 4,000 Daltons. In one particular example, said GFR-binding compound has a molecular weight of less than 3,000 Daltons. In one particular example, said GFR-binding compound has a molecular weight comprised between 600 and 4,000 Daltons. In one particular example, said GFR-binding compound has a molecular weight comprised between 800 and 4,000 Daltons. In one particular example, said GFR-binding compound has a molecular weight comprised between 600 and 3,000 Daltons. In one particular example, said GFR-binding compound has a molecular weight comprised between 800 and 3,000 Daltons. Between 800 and 3,000 Daltons is particularly preferred.

[0264] In one particular example, the growth factor receptor involved in the interaction with said GFR-binding compound is an epidermal growth factor receptor. In one particular example, the growth factor receptor involved in the interaction with said GFR-binding compound is a fibroblast growth factor receptor. In one particular example, the growth factor receptor involved in the interaction with said GFR-binding compound is a vascular endothelial growth factor receptor. In one particular example, the growth factor receptor involved in the interaction with said GFR-binding compound is a nerve growth factor receptor. In one particular example, the growth factor receptor involved in the interaction with said GFR-binding compound is a hepatocyte growth factor receptor. In one particular example, the growth factor receptor involved in the interaction with said GFR-binding compound is a somatomedin or insulin-like growth factor receptor. In one particular example, the growth factor receptor involved in the interaction with said GFR-binding compound is a platelet-derived growth factor receptor. In one particular example, the growth factor receptor involved in the interaction with said GFR-binding compound is a protein from the transforming growth factor beta (TGF-β) superfamily.

[0265] In one particular example, the growth factor receptor(s) involved in the interaction with said GFR-binding compound is (are) preferably selected from epidermal growth factor receptors, fibroblast growth factor receptors, vascular endothelial growth factor receptors, nerve growth factor receptors, hepatocyte growth factor receptors, somatomedin or insulin-like growth factor receptors, platelet-derived growth factor receptors, and transforming growth factor beta (TGF-β) superfamily proteins.

[0266] In one particular example, said GFR-binding compound is a peptide, or a variant or analog thereof, exclusively consisting of (or constituted of) between 8-30 amino acids, in particular between 8-25 amino acids or between 8-22 amino acids, more particularly between 18-22 amino acids, even more particularly between 19-21 or 20 amino acids; wherein the RMSD value of the three dimensional (3D) atomic coordinates of said GFR-binding compound with respect to PEPREF is 2.45 Å (Angstroms) or less, in particular is 2 Å or less, and more particularly is 1.79 Å or less, and wherein PEPREF is the set of 3D atomic coordinates already defined herein (hereinafter also referred to as “wherein the RMSD is 2.45 Å or less” for the sake of conciseness).

[0267] In one particular example, said GFR-binding compound is a peptide, or a variant or analog thereof, exclusively consisting of (or constituted of) between 8-30 amino acids; wherein the RMSD value of the three dimensional (3D) atomic coordinates of said GFR-binding compound with respect to PEPREF is 2.45 Å (Angstroms) or less, in particular is 2 Å, or less, and more particularly is 1.79 Å or less, and wherein PEPREF is the set of 3D atomic coordinates already defined herein.

[0268] In one particular example, said GFR-binding compound is a peptide, or a variant or analog thereof, exclusively consisting of (or constituted of) between 8-30 amino acids, in particular between 8-25 amino acids or between 8-22 amino acids, more particularly between 18-22 amino acids, even more particularly between 19-21 or 20 amino acids; wherein the RMSD value of the three dimensional (3D) atomic coordinates of said GFR-binding compound with respect to PEPREF is 2.45 Å (Angstroms) or less, in particular is 2 Å or less, and more particularly is 1.79 Å or less, and wherein PEPREF is the set of 3D atomic coordinates already defined herein.

[0269] In one particular example, said GFR-binding compound is a peptide, or a variant or analog thereof, exclusively consisting of (or constituted of) between 8-25 amino acids; wherein the RMSD value of the three dimensional (3D) atomic coordinates of said GFR-binding compound with respect to PEPREF is 2.45 Å (Angstroms) or less, in particular is 2 Å or less, and more particularly is 1.79 Å or less, and wherein PEPREF is the set of 3D atomic coordinates already defined herein.

[0270] In one particular example, said GFR-binding compound is a peptide, or a variant or analog thereof, exclusively consisting of (or constituted of) between 8-22 amino acids; wherein the RMSD value of the three dimensional (3D) atomic coordinates of said GFR-binding compound with respect to PEPREF is 2.45 Å (Angstroms) or less, in particular is 2 Å or less, and more particularly is 1.79 Å or less, and wherein PEPREF is the set of 3D atomic coordinates already defined herein.

[0271] In one particular example, said GFR-binding compound is a peptide, or a variant or analog thereof, exclusively consisting of (or constituted of) between 18-22 amino acids; wherein the RMSD value of the three dimensional (3D) atomic coordinates of said GFR-binding compound with respect to PEPREF is 2.45 Å (Angstroms) or less, in particular is 2 Å or less, and more particularly is 1.79 Å or less, and wherein PEPREF is the set of 3D atomic coordinates already defined herein.

[0272] In one particular example, said GFR-binding compound is a peptide, or a variant or analog thereof, exclusively consisting of (or constituted of) between 19-21 amino acids; wherein the RMSD value of the three dimensional (3D) atomic coordinates of said GFR-binding compound with respect to PEPREF is 2.45 Å (Angstroms) or less, in particular is 2 Å or less, and more particularly is 1.79 Å or less, and wherein PEPREF is the set of 3D atomic coordinates already defined herein.

[0273] In one particular example, said GFR-binding compound is a peptide, or a variant or analog thereof, exclusively consisting of (or constituted of) 20 amino acid; wherein the RMSD value of the three dimensional (3D) atomic coordinates of said GFR-binding compound with respect to PEPREF is 2.45 Å (Angstroms) or less, in particular is 2 Å or less, and more particularly is 1.79 Å or less, and wherein PEPREF is the set of 3D atomic coordinates already defined herein.

[0274] In one particular example, said GFR-binding compound is a peptide, or a variant or analog thereof, exclusively consisting of (or constituted of) between 8-18 amino acids; wherein the RMSD value of the three dimensional (3D) atomic coordinates of said GFR-binding compound with respect to PEPREF is 2.45 Å (Angstroms) or less, in particular is 2 Å or less, and more particularly is 1.79 Å or less, and wherein PEPREF is the set of 3D atomic coordinates already defined herein.

[0275] In one particular example, said GFR-binding compound is a peptide, or a variant or analog thereof, exclusively consisting of (or constituted of) between 22-30 amino acids; wherein the RMSD value of the three dimensional (3D) atomic coordinates of said GFR-binding compound with respect to PEPREF is 2.45 Å (Angstroms) or less, in particular is 2 Å or less, and more particularly is 1.79 Å or less, and wherein PEPREF is the set of 3D atomic coordinates already defined herein.

[0276] In one particular example, said GFR-binding compound is a peptidomimetic as defined herein, comprising (consecutively or non-consecutively) between 8-30 amino acids, in particular between 8-25 amino acids or between 8-22 amino acids, more particularly between 18-22 amino acids, even more particularly between 19-21 or 20; wherein said GFR-binding compound has a molecular weight comprised between 600 and 4,000 Daltons (in particular, between 800-4,000 Da, 600-3,000 Da, more particularly between 800-3,000 Da); In one aspect, the present disclosure provides a GFR-binding compound, wherein said GFR-binding compound is a peptide, a variant or analog thereof, or a peptidomimetic as defined herein, having growth factor receptor-binding capability or capabilities, having a molecular weight of between 600-4,000 Da, 600-3,000 Da, or 800-4,000 Da, in particular between 800 and 3,000 Da; and wherein the RMSD is 2.45 Å or less.

[0277] In one aspect, the present disclosure provides a GFR-binding compound, wherein said GFR-binding compound is a peptide, a variant or analog thereof, or a peptidomimetic as defined herein, having growth factor receptor-binding capability or capabilities, with (comprising, or exclusively consisting of, or constituted of) between 8 and 30 (in particular between 8-25 or between 8-22, more particularly between 18-22, even more particularly between 19-21 or 20) amino acids, comprising a peptide with four amino acids (PEP1); and wherein the RMSD is 2.45 Å or less.

[0278] In one aspect, the present disclosure provides a GFR-binding compound, wherein said GFR-binding compound is a peptide, a variant or analog thereof, or a peptidomimetic as defined herein, with (comprising, or exclusively consisting of, or constituted of) between 8 and 30 (in particular between 8-25 or between 8-22, more particularly between 18-22, even more particularly between 19-21 or 20) amino acids, comprising a peptide with eight amino acids (PEP12); and wherein the RMSD is 2.45 Å or less.

[0279] In one aspect, the present disclosure provides a GFR-binding compound, wherein said GFR-binding compound is a peptide, a variant or analog thereof, or a peptidomimetic as defined herein, with (comprising, or exclusively consisting of, or constituted of) between 8 and 30 (in particular between 8-25 or between 8-22, more particularly between 18-22, even more particularly between 19-21 or 20) amino acids, comprising a peptide with four amino acids (PEP1); wherein said GFR-binding compound further comprises a peptide with three amino acids (PEP3); and wherein the RMSD is 2.45 Å or less.

[0280] In one aspect, the present disclosure provides a GFR-binding compound, wherein said GFR-binding compound is a peptide, a variant or analog thereof, or a peptidomimetic as defined herein, with (comprising, or exclusively consisting of, or constituted of) between 8 and 30 (in particular between 8-25 or between 8-22, more particularly between 18-22, even more particularly between 19-21 or 20) amino acids, comprising a peptide with eight amino acids (PEP12); wherein said GFR-binding compound further comprises a peptide with three amino acids (PEP3); and wherein the RMSD is 2.45 Å or less.

[0281] In one aspect, the present disclosure provides a GFR-binding compound, wherein said GFR-binding compound is a peptide, a variant or analog thereof, or a peptidomimetic as defined herein, with (comprising, or exclusively consisting of, or constituted of) between 8 and 30 (in particular between 8-25 or between 8-22, more particularly between 18-22, even more particularly between 19-21 or 20) amino acids, comprising a peptide with four amino acids (PEP1); wherein said GFR-binding compound further comprises a peptide with five amino acids (PEP5); and wherein the RMSD is 2.45 Å or less.

[0282] In one aspect, the present disclosure provides a GFR-binding compound, wherein said GFR-binding compound is a peptide, a variant or analog thereof, or a peptidomimetic as defined herein, with (comprising, or exclusively consisting of, or constituted of) between 8 and 30 (in particular between 8-25 or between 8-22, more particularly between 18-22, even more particularly between 19-21 or 20) amino acids, comprising a peptide with eight amino acids (PEP12); wherein said GFR-binding compound further comprises a peptide with five amino acids (PEP5); and wherein the RMSD is 2.45 Å or less.

[0283] In one aspect, the present disclosure provides a GFR-binding compound, wherein said GFR-binding compound is a peptide, a variant or analog thereof, or a peptidomimetic as defined herein, with (comprising, or exclusively consisting of, or constituted of) between 8 and 30 (in particular between 8-25 or between 8-22, more particularly between 18-22, even more particularly between 19-21 or 20) amino acids, comprising a peptide with four amino acids (PEP1); wherein said GFR-binding compound further comprises a peptide with between six and twelve amino acids (PEP9); and wherein the RMSD is 2.45 Å or less.

[0284] In one aspect, the present disclosure provides a GFR-binding compound, wherein said GFR-binding compound is a peptide, a variant or analog thereof, or a peptidomimetic as defined herein, with (comprising, or exclusively consisting of, or constituted of) between 8 and 30 (in particular between 8-25 or between 8-22, more particularly between 18-22, even more particularly between 19-21 or 20) amino acids, comprising a peptide with eight amino acids (PEP12); wherein said GFR-binding compound further comprises a peptide with between six and twelve amino acids (PEP9); and wherein the RMSD is 2.45 Å or less.

[0285] In one aspect, the present disclosure provides a GFR-binding compound, wherein said GFR-binding compound is a peptide, a variant or analog thereof, or a peptidomimetic as defined herein, with (comprising, or exclusively consisting of, or constituted of) between 8 and 30 (in particular between 8-25 or between 8-22, more particularly between 18-22, even more particularly between 19-21 or 20) amino acids, comprising a peptide with four amino acids (PEP1); wherein said GFR-binding compound further comprises a peptide with three amino acids (PEP3), an amino acid or a peptide with between two and seven amino acids (PEP7); and wherein the RMSD is 2.45 Å or less.

[0286] In one aspect, the present disclosure provides a GFR-binding compound, wherein said GFR-binding compound is a peptide, a variant or analog thereof, or a peptidomimetic as defined herein, with (comprising, or exclusively consisting of, or constituted of) between 8 and 30 (in particular between 8-25 or between 8-22, more particularly between 18-22, even more particularly between 19-21 or 20) amino acids, comprising a peptide with four amino acids (PEP12); wherein said GFR-binding compound further comprises a peptide with three amino acids (PEP3), an amino acid or a peptide with between two and seven amino acids (PEP7); and wherein the RMSD is 2.45 Å or less.

[0287] In one aspect, the present disclosure provides a GFR-binding compound, wherein said GFR-binding compound is a peptide, a variant or analog thereof, or a peptidomimetic as defined herein, with (comprising, or exclusively consisting of, or constituted of) between 8 and 30 (in particular between 8-25 or between 8-22, more particularly between 18-22, even more particularly between 19-21 or 20) amino acids, comprising a peptide with four amino acids (PEP1); wherein said GFR-binding compound further comprises a peptide with five amino acids (PEP5), an amino acid or a peptide with between two and seven amino acids (PEP7); and wherein the RMSD is 2.45 Å or less.

[0288] In one aspect, the present disclosure provides a GFR-binding compound, wherein said GFR-binding compound is a peptide, a variant or analog thereof, or a peptidomimetic as defined herein, with (comprising, or exclusively consisting of, or constituted of) between 8 and 30 (in particular between 8-25 or between 8-22, more particularly between 18-22, even more particularly between 19-21 or 20) amino acids, comprising a peptide with four amino acids (PEP12); wherein said GFR-binding compound further comprises a peptide with five amino acids (PEP5), an amino acid or a peptide with between two and seven amino acids (PEP7); and wherein the RMSD is 2.45 Å or less.

[0289] In one aspect, the present disclosure provides a GFR-binding compound, wherein said GFR-binding compound is a peptide, a variant or analog thereof, or a peptidomimetic as defined herein, with (comprising, or exclusively consisting of, or constituted of) between 8 and 30 (in particular between 8-25 or between 8-22, more particularly between 18-22, even more particularly between 19-21 or 20) amino acids, having the following general formula (I) (hereinafter may also be referred to as compound (I) or peptide (I)):

PEP(C)−PEP12 (I)

[0290] wherein PEP12 is a peptide with 8 amino acids of formula PEP1-AA¹⁷-PEP11 as defined herein; wherein one end of PEP(C) interacts covalently with PEP12 via one end of PEP1; wherein PEP(C) is a peptide with at least 5 amino acids, in particular a peptide with between 5 and 12 amino acids; and wherein the RMSD is 2.45 Å or less.

[0291] In one aspect, the present disclosure provides a GFR-binding compound of general formula (I), wherein PEP(C) comprises PEP3; and wherein the RMSD is 2.45 Å or less.

[0292] In one aspect, the present disclosure provides a GFR-binding compound of general formula (I), wherein PEP(C) comprises PEP5; and wherein the RMSD is 2.45 Å or less. In one particular example, PEP(C) is PEP5.

[0293] In one aspect, the present disclosure provides a GFR-binding compound of general formula (I), wherein PEP(C) comprises PEP9; and wherein the RMSD is 2.45 Å or less. In one particular example, PEP(C) is PEP9.

[0294] In one aspect, the present disclosure provides a GFR-binding compound of general formula (I), wherein PEP(C) comprises PEP3 and PEP7; and wherein the RMSD is 2.45 Å or less.

[0295] In one aspect, the present disclosure provides a GFR-binding compound of general formula (I), wherein PEP(C) comprises PEP5 and PEP7; and wherein the RMSD is 2.45 Å or less.

[0296] In one aspect, the present disclosure provides a GFR-binding compound, wherein said GFR-binding compound is a peptide, a variant or analog thereof, or a peptidomimetic as defined herein, with (comprising, or exclusively consisting of, or constituted of) between 8 and 30 (in particular between 8-25 or between 8-22, more particularly between 18-22, even more particularly between 19-21 or 20) amino acids, having the following general formula (II) (hereinafter may also be referred to as compound (II) or peptide (II)):

PEP7−PEP5−PEP12 (II)

[0297] wherein PEP12 is a peptide with 8 amino acids of formula PEP1-AA¹⁷-PEP11 as defined herein; wherein PEP5 is a peptide with five amino acids as defined herein; wherein PEP7 is an amino acid or a peptide with between two and seven amino acids as defined herein; wherein one end of PEP5 interacts covalently with one end of PEP12 via one end of PEP1; wherein another end of PEP5 interacts covalently with one end of PEP7 via AA⁷; and wherein the RMSD is 2.45 Å or less.

[0298] In certain embodiments, PEP1 is selected from the group consisting of SAIS (SEQ ID NO: 6360), SSLS (SEQ ID NO: 6365), NAIS (SEQ ID NO: 6357), SATS (SEQ ID NO: 6361), SPIS (SEQ ID NO: 6364), EPIS (SEQ ID NO: 6353), SPIN (SEQ ID NO: 6363), KPLS (SEQ ID NO: 6356), EPLP (SEQ ID NO: 6354), EPLT (SEQ ID NO: 6355), SNIT (SEQ ID NO: 6362), RSVK (SEQ ID NO: 6359) and RPVQ (SEQ ID NO: 6358).

[0299] In certain embodiments, PEP3 is selected from the group consisting of VPT, VPE, APT, TPT, VPA, APV, VPQ, VSQ, SRV and TQV.

[0300] In certain embodiments, PEP5 is a peptide of general formula PEP3-AA¹¹-AA¹²; wherein PEP3 is selected from the group consisting of VPT, VPE, APT, TPT, VPA, APV, VPQ, VSO, SRV and TQV; wherein AA¹¹ is selected from the group consisting of E, K, Q, R, A, D, G and H; and wherein AA¹² is selected from the group consisting of L, M, T, E, Q and H. In one particular example, PEP5 is selected from the group consisting of VPTEL (SEQ ID NO: 6421), VPEKM (SEQ ID NO: 6406), APTKL (SEQ ID NO: 6369), APTQL (SEQ ID NO: 6372), VPTKL (SEQ ID NO: 6423), TPTKM (SEQ ID NO: 6388), VPARL (SEQ ID NO: 6401), VPTRL (SEQ ID NO: 6427), APVKT (SEQ ID NO: 6379), VPQAL (SEQ ID NO: 6410), VSODL (SEQ ID NO: 6429), VPQDL (SEQ ID NO: 6411), VPTEE (SEQ ID NO: 6420), VPTGQ (SEQ ID NO: 6422), SRVHH (SEQ ID NO: 6382) and TQVQL (SEQ ID NO: 6393).

[0301] In certain embodiments, PEP7 is an amino acid or a peptide with between two and seven amino acids of general formula AA¹-AA²-AA³-AA⁴-AA⁵-AA⁶-AA⁷ (SEQ ID NO: 6606); wherein wherein AA¹, AA², AA³, AA⁴, and AA⁵ are independently absent or AA^{I} as defined herein; wherein AA⁶ is absent or selected from the group consisting of S, T, C, E, Q, P and R; wherein AA⁷ is absent or is selected from the group consisting of S, T, C, E, Q, P and R, and wherein at least one of AA, AA², AA³, AA⁴, AA⁵, AA⁶ or AA⁷ is not absent. In one particular example, PEP7 is selected from the group consisting of KIPKAXX (SEQ ID NO: 6445), GIPEPXX (SEQ ID NO: 6440), SIPKAXX (SEQ ID NO: 6450), HVTKPTX (SEQ ID NO: 6443), YVPKPXX (SEQ ID NO: 6454), TVPKPXX (SEQ ID NO: 6453), AVPKAXX (SEQ ID NO: 6439), KVGKAXX (SEQ ID NO: 6446), KASKAXX (SEQ ID NO: 6444), GSAGPXX (SEQ ID NO: 6441), AAPASXX (SEQ ID NO: 6436), STPPTXX (SEQ ID NO: 6452), HVPKPXX (SEQ ID NO: 6442), RVPSTXX (SEQ ID NO: 6449), ASAAPXX (SEQ ID NO: 6437), ASASPXX (SEQ ID NO: 6438), NDEGLEX (SEQ ID NO: 6447), SSVKXQP (SEQ ID NO: 6451) and RNVQXRP (SEQ ID NO: 6448), wherein X is C or S throughout the present description.

[0302] In certain embodiments, PEP9 is a peptide of general formula PEP7-PEP5; wherein PEP5 is a peptide of formula PEP3-AA¹¹-AA¹²; wherein PEP3 is selected from the group consisting of VPT, VPE, APT, TPT, VPA, APV, VPQ, VSO, SRV and TQV; wherein AA¹¹ is selected from the group consisting of E, K, Q, R, A, D, G and H; and wherein AA¹² is selected from the group consisting of L, M, T, E, Q and H; wherein PEP7 is an amino acid or a peptide with between two and seven amino acids of general formula AA¹-AA²-AA³-AA⁴-AA⁵-AA⁶-AA⁷ (SEQ ID NO: 6606); wherein AA¹, AA², AA³, AA⁴, and AA⁵ are independently absent or AA^{I} as defined herein; wherein AA⁶ is absent or selected from the group consisting of S, T, C, E, Q, P and R; wherein AA⁷ is absent or is selected from the group consisting of S, T, C, E, Q, P and R. In one particular example, PEP9 is selected from the group consisting of KIPKAXXVPTEL (SEQ ID NO: 6535), GIPEPXXVPEKM (SEQ ID NO: 6491), SIPKAXXVPTEL (SEQ ID NO: 6563), HVTKPTXAPTKL (SEQ ID NO: 6511), YVPKPXXAPTKL (SEQ ID NO: 6583), TVPKPXXAPTQL (SEQ ID NO: 6575), AVPKAXXAPTKL (SEQ ID NO: 6479), KVGKAXXVPTKL (SEQ ID NO: 6543), KASKAXXVPTKL (SEQ ID NO: 6527), GSAGPXXTPTKM (SEQ ID NO: 6497), AAPASXXVPARL (SEQ ID NO: 6458), STPPTXXVPTRL (SEQ ID NO: 6573), HVPKPXXAPTKL (SEQ ID NO: 6503), RVPSTXXAPVKT (SEQ ID NO: 6550), ASAAPXXVPQAL (SEQ ID NO: 6468), ASASPXXVSQDL (SEQ ID NO: 6478), ASASPXXVPQDL (SEQ ID NO: 6476), NDEGLEXVPTEE (SEQ ID NO: 6545), NDEGLEXVPTGQ (SEQ ID NO: 6546), SSVKXQPSRVHH (SEQ ID NO: 6565) and RNVQXRPTQVQL (SEQ ID NO: 6548), wherein X is C or S throughout the present description.

[0303] In certain embodiments, PEP12 is a peptide of general formula PEP1-AA¹⁷-PEP11; wherein AA¹⁷ is selected from the group consisting of G, A, V, L, I, P, F, M, W, T and S (in particular is selected from the group consisting of M, I, L, V and T); wherein PEP1 is selected from the group consisting of SAIS (SEQ ID NO: 6360), SSLS (SEQ ID NO: 6365), NAIS (SEQ ID NO: 6357), SATS (SEQ ID NO: 6361), SPIS (SEQ ID NO: 6364), EPIS (SEQ ID NO: 6353), SPIN (SEQ ID NO: 6363), KPLS (SEQ ID NO: 6356), EPLP (SEQ ID NO: 6354), EPLT (SEQ ID NO: 6355), SNIT (SEQ ID NO: 6362), RSVK (SEQ ID NO: 6359) and RPVQ (SEQ ID NO: 6358).

[0304] In particular, in certain embodiments, the pair PEP3:PEP1 is selected from the group consisting of VPT:SAIS (SEQ ID NO: 6360), VPE:SAIS (SEQ ID NO: 6360), APT:SAIS (SEQ ID NO: 6360), TPT:SAIS (SEQ ID NO: 6360), VPA:SAIS (SEQ ID NO: 6360), APV:SAIS (SEQ ID NO: 6360), VPQ:SAIS (SEQ ID NO: 6360), VSQ:SAIS (SEQ ID NO: 6360), SRV:SAIS (SEQ ID NO: 6360), TQV:SAIS (SEQ ID NO: 6360), VPE:SSLS (SEQ ID NO: 6365), VPT:SSLS (SEQ ID NO: 6365), APT:SSLS (SEQ ID NO: 6365), TPT:SSLS (SEQ ID NO: 6365), VPA:SSLS (SEQ ID NO: 6365), APV:SSLS (SEQ ID NO: 6365), VPQ:SSLS (SEQ ID NO: 6365), VSQ:SSLS (SEQ ID NO: 6365), SRV:SSLS (SEQ ID NO: 6365), TQV:SSLS (SEQ ID NO: 6365), APT:NAIS (SEQ ID NO: 6357), VPT:NAIS (SEQ ID NO: 6357), VPE:NAIS (SEQ ID NO: 6357), TPT:NAIS (SEQ ID NO: 6357), VPA:NAIS (SEQ ID NO: 6357), APV:NAIS (SEQ ID NO: 6357), VPQ:NAIS (SEQ ID NO: 6357), VSQ:NAIS (SEQ ID NO: 6357), SRV:NAIS (SEQ ID NO: 6357), TQV:NAIS (SEQ ID NO: 6357), APT:SATS (SEQ ID NO: 6361), VPT:SATS (SEQ ID NO: 6361), VPE:SATS (SEQ ID NO: 6361), TPT:SATS (SEQ ID NO: 6361), VPA:SATS (SEQ ID NO: 6361), APV:SATS (SEQ ID NO: 6361), VPQ:SATS (SEQ ID NO: 6361), VSQ:SATS (SEQ ID NO: 6361), SRV:SATS (SEQ ID NO: 6361), TQV:SATS (SEQ ID NO: 6361), VPT:SPIS (SEQ ID NO: 6364), VPE:SPIS (SEQ ID NO: 6364), APT:SPIS (SEQ ID NO: 6364), TPT:SPIS (SEQ ID NO: 6364), VPA:SPIS (SEQ ID NO: 6364), APV:SPIS (SEQ ID NO: 6364), VPQ:SPIS (SEQ ID NO: 6364), VSQ:SPIS (SEQ ID NO: 6364), SRV:SPIS (SEQ ID NO: 6364), TQV:SPIS (SEQ ID NO: 6364), VPT:EPIS (SEQ ID NO: 6353), VPE:EPIS (SEQ ID NO: 6353), APT:EPIS (SEQ ID NO: 6353), TPT:EPIS (SEQ ID NO: 6353), VPA:EPIS (SEQ ID NO: 6353), APV:EPIS (SEQ ID NO: 6353), VPQ:EPIS (SEQ ID NO: 6353), VSQ:EPIS (SEQ ID NO: 6353), SRV:EPIS (SEQ ID NO: 6353), TQV:EPIS (SEQ ID NO: 6353), TPT:SPIN (SEQ ID NO: 6363), VPT:SPIN (SEQ ID NO: 6363), VPE:SPIN (SEQ ID NO: 6363), APT:SPIN (SEQ ID NO: 6363), VPA:SPIN (SEQ ID NO: 6363), APV:SPIN (SEQ ID NO: 6363), VPQ:SPIN (SEQ ID NO: 6363), VSQ:SPIN (SEQ ID NO: 6363), SRV:SPIN (SEQ ID NO: 6363), TQV:SPIN (SEQ ID NO: 6363), APV:KPLS (SEQ ID NO: 6356), VPT:KPLS (SEQ ID NO: 6356), VPE:KPLS (SEQ ID NO: 6356), APT:KPLS (SEQ ID NO: 6356), TPT:KPLS (SEQ ID NO: 6356), VPA:KPLS (SEQ ID NO: 6356), VPQ:KPLS (SEQ ID NO: 6356), VSQ:KPLS (SEQ ID NO: 6356), SRV:KPLS (SEQ ID NO: 6356), TQV:KPLS (SEQ ID NO: 6356), VPQ:EPLP (SEQ ID NO: 6354), VPT:EPLP (SEQ ID NO: 6354), VPE:EPLP (SEQ ID NO: 6354), APT:EPLP (SEQ ID NO: 6354), TPT:EPLP (SEQ ID NO: 6354), VPA:EPLP (SEQ ID NO: 6354), APV:EPLP (SEQ ID NO: 6354), VSQ:EPLP (SEQ ID NO: 6354), SRV:EPLP (SEQ ID NO: 6354), TQV:EPLP (SEQ ID NO: 6354), VSQ:EPLT (SEQ ID NO: 6355), VPT:EPLT (SEQ ID NO: 6355), VPE:EPLT (SEQ ID NO: 6355), APT:EPLT (SEQ ID NO: 6355), TPT:EPLT (SEQ ID NO: 6355), VPA:EPLT (SEQ ID NO: 6355), APV:EPLT (SEQ ID NO: 6355), VPQ:EPLT (SEQ ID NO: 6355), SRV:EPLT (SEQ ID NO: 6355), TQV:EPLT (SEQ ID NO: 6355), VPT:SNIT (SEQ ID NO: 6362), VPE:SNIT (SEQ ID NO: 6362), APT:SNIT (SEQ ID NO: 6362), TPT:SNIT (SEQ ID NO: 6362), VPA:SNIT (SEQ ID NO: 6362), APV:SNIT (SEQ ID NO: 6362), VPQ:SNIT (SEQ ID NO: 6362), VSQ:SNIT (SEQ ID NO: 6362), SRV:SNIT (SEQ ID NO: 6362), TQV:SNIT (SEQ ID NO: 6362), SRV:RSVK (SEQ ID NO: 6359), VPT:RSVK (SEQ ID NO: 6359), VPE:RSVK (SEQ ID NO: 6359), APT:RSVK (SEQ ID NO: 6359), TPT:RSVK (SEQ ID NO: 6359), VPA:RSVK (SEQ ID NO: 6359), APV:RSVK (SEQ ID NO: 6359), VPQ:RSVK (SEQ ID NO: 6359), VSQ:RSVK (SEQ ID NO: 6359), TQV:RSVK (SEQ ID NO: 6359), TQV:RPVQ (SEQ ID NO: 6358), VPT:RPVQ (SEQ ID NO: 6358), VPE:RPVQ (SEQ ID NO: 6358), APT:RPVQ (SEQ ID NO: 6358), TPT:RPVQ (SEQ ID NO: 6358), VPA:RPVQ (SEQ ID NO: 6358), APV:RPVQ (SEQ ID NO: 6358), VPQ:RPVQ (SEQ ID NO: 6358), VSQ:RPVQ (SEQ ID NO: 6358) and SRV:RPVQ (SEQ ID NO: 6358).

[0305] In particular, in certain embodiments, the pair PEP5:PEP1 is selected from the group consisting of VPTKM (SEQ ID NO: 6424):SAIS (SEQ ID NO: 6360), VPTKL (SEQ ID NO: 6423):SAIS (SEQ ID NO: 6360), VPTQL (SEQ ID NO: 6426):SAIS (SEQ ID NO: 6360), VPTRL (SEQ ID NO: 6427):SAIS (SEQ ID NO: 6360), VPTKT (SEQ ID NO: 6425):SAIS (SEQ ID NO: 6360), VPTAL (SEQ ID NO: 6418):SAIS (SEQ ID NO: 6360), VPTDL (SEQ ID NO: 6419):SAIS (SEQ ID NO: 6360), VPEKM (SEQ ID NO: 6406):SAIS (SEQ ID NO: 6360), APTKL (SEQ ID NO: 6369):SAIS (SEQ ID NO: 6360), APTOL (SEQ ID NO: 6372):SAIS (SEQ ID NO: 6360), TPTKM (SEQ ID NO: 6388):SAIS (SEQ ID NO: 6360), VPARL (SEQ ID NO: 6401):SAIS (SEQ ID NO: 6360), APVKT (SEQ ID NO: 6379):SAIS (SEQ ID NO: 6360), VPQAL (SEQ ID NO: 6410):SAIS (SEQ ID NO: 6360), VSODL (SEQ ID NO: 6429):SAIS (SEQ ID NO: 6360), VPQDL (SEQ ID NO: 6411):SAIS (SEQ ID NO: 6360), SRVHH (SEQ ID NO: 6382):SAIS (SEQ ID NO: 6360), TQVQL (SEQ ID NO: 6393):SAIS (SEQ ID NO: 6360), VPEEL (SEQ ID NO: 6404):SSLS (SEQ ID NO: 6365), VPEKL (SEQ ID NO: 6405):SSLS (SEQ ID NO: 6365), VPEQL (SEQ ID NO: 6408):SSLS (SEQ ID NO: 6365), VPEKM (SEQ ID NO: 6406):SSLS (SEQ ID NO: 6365), VPERL (SEQ ID NO: 6409):SSLS (SEQ ID NO: 6365), VPEKT (SEQ ID NO: 6407):SSLS (SEQ ID NO: 6365), VPEAL (SEQ ID NO: 6402):SSLS (SEQ ID NO: 6365), VPEDL (SEQ ID NO: 6403):SSLS (SEQ ID NO: 6365), VPTEL (SEQ ID NO: 6421):SSLS (SEQ ID NO: 6365), APTKL (SEQ ID NO: 6369):SSLS (SEQ ID NO: 6365), APTQL (SEQ ID NO: 6372):SSLS (SEQ ID NO: 6365), VPTKL (SEQ ID NO: 6423):SSLS (SEQ ID NO: 6365), TPTKM (SEQ ID NO: 6388):SSLS (SEQ ID NO: 6365), VPARL (SEQ ID NO: 6401):SSLS (SEQ ID NO: 6365), VPTRL (SEQ ID NO: 6427)SSLS (SEQ ID NO: 6365), APVKT (SEQ ID NO: 6379):SSLS (SEQ ID NO: 6365), VPQAL (SEQ ID NO: 6410):SSLS (SEQ ID NO: 6365), VSODL (SEQ ID NO: 6429):SSLS (SEQ ID NO: 6365), VPQDL (SEQ ID NO: 6411):SSLS (SEQ ID NO: 6365), VPTEE (SEQ ID NO: 6420):SSLS (SEQ ID NO: 6365), VPTGQ (SEQ ID NO: 6422)SSLS (SEQ ID NO: 6365), SRVHH (SEQ ID NO: 6382):SSLS (SEQ ID NO: 6365), TQVQL (SEQ ID NO: 6393):SSLS (SEQ ID NO: 6365), APTEL (SEQ ID NO: 6368):NAIS (SEQ ID NO: 6357), APTKM (SEQ ID NO: 6370):NAIS (SEQ ID NO: 6357), APTKL (SEQ ID NO: 6369):NAIS (SEQ ID NO: 6357), APTRL (SEQ ID NO: 6373):NAIS (SEQ ID NO: 6357), APTKT (SEQ ID NO: 6371):NAIS (SEQ ID NO: 6357), APTAL (SEQ ID NO: 6366):NAIS (SEQ ID NO: 6357), APTDL (SEQ ID NO: 6367):NAIS (SEQ ID NO: 6357), VPTEL (SEQ ID NO: 6421):NAIS (SEQ ID NO: 6357), VPEKM (SEQ ID NO: 6406):NAIS (SEQ ID NO: 6357), VPTKL (SEQ ID NO: 6423):NAIS (SEQ ID NO: 6357), TPTKM (SEQ ID NO: 6388):NAIS (SEQ ID NO: 6357), VPARL (SEQ ID NO: 6401):NAIS (SEQ ID NO: 6357), VPTRL (SEQ ID NO: 6427):NAIS (SEQ ID NO: 6357), APVKT (SEQ ID NO: 6379):NAIS (SEQ ID NO: 6357), VPQAL (SEQ ID NO: 6410):NAIS (SEQ ID NO: 6357), VSODL (SEQ ID NO: 6429):NAIS (SEQ ID NO: 6357), VPQDL (SEQ ID NO: 6411):NAIS (SEQ ID NO: 6357), VPTEE (SEQ ID NO: 6420):NAIS (SEQ ID NO: 6357), VPTGQ (SEQ ID NO: 6422):NAIS (SEQ ID NO: 6357), SRVHH (SEQ ID NO: 6382):NAIS (SEQ ID NO: 6357), TQVQL (SEQ ID NO: 6393):NAIS (SEQ ID NO: 6357), APTEL (SEQ ID NO: 6368):SATS (SEQ ID NO: 6361), APTKM (SEQ ID NO: 6370):SATS (SEQ ID NO: 6361), APTKL (SEQ ID NO: 6369):SATS (SEQ ID NO: 6361), APTQL (SEQ ID NO: 6372):SATS (SEQ ID NO: 6361), APTRL (SEQ ID NO: 6373):SATS (SEQ ID NO: 6361), APTKT (SEQ ID NO: 6371):SATS (SEQ ID NO: 6361), APTAL (SEQ ID NO: 6366):SATS (SEQ ID NO: 6361), APTDL (SEQ ID NO: 6367):SATS (SEQ ID NO: 6361), VPTEL (SEQ ID NO: 6421):SATS (SEQ ID NO: 6361), VPEKM (SEQ ID NO: 6406):SATS (SEQ ID NO: 6361), VPTKL (SEQ ID NO: 6423):SATS (SEQ ID NO: 6361), TPTKM (SEQ ID NO: 6388):SATS (SEQ ID NO: 6361), VPARL (SEQ ID NO: 6401):SATS (SEQ ID NO: 6361), VPTRL (SEQ ID NO: 6427):SATS (SEQ ID NO: 6361), APVKT (SEQ ID NO: 6379):SATS (SEQ ID NO: 6361), VPQAL (SEQ ID NO: 6410):SATS (SEQ ID NO: 6361), VSODL (SEQ ID NO: 6429):SATS (SEQ ID NO: 6361), VPQDL (SEQ ID NO: 6411):SATS (SEQ ID NO: 6361), VPTEE (SEQ ID NO: 6420):SATS (SEQ ID NO: 6361), VPTGQ (SEQ ID NO: 6422):SATS (SEQ ID NO: 6361), SRVHH (SEQ ID NO: 6382):SATS (SEQ ID NO: 6361), TQVQL (SEQ ID NO: 6393):SATS (SEQ ID NO: 6361), VPTEL (SEQ ID NO: 6421):SPIS (SEQ ID NO: 6364), VPTKM (SEQ ID NO: 6424):SPIS (SEQ ID NO: 6364), VPTKL (SEQ ID NO: 6423):SPIS (SEQ ID NO: 6364), VPTQL (SEQ ID NO: 6426):SPIS (SEQ ID NO: 6364), VPTRL (SEQ ID NO: 6427):SPIS (SEQ ID NO: 6364), VPTKT (SEQ ID NO: 6425):SPIS (SEQ ID NO: 6364), VPTAL (SEQ ID NO: 6418):SPIS (SEQ ID NO: 6364), VPTDL (SEQ ID NO: 6419):SPIS (SEQ ID NO: 6364), VPEKM (SEQ ID NO: 6406):SPIS (SEQ ID NO: 6364), APTKL (SEQ ID NO: 6369):SPIS (SEQ ID NO: 6364), APTOL (SEQ ID NO: 6372):SPIS (SEQ ID NO: 6364), TPTKM (SEQ ID NO: 6388):SPIS (SEQ ID NO: 6364), VPARL (SEQ ID NO: 6401):SPIS (SEQ ID NO: 6364), APVKT (SEQ ID NO: 6379):SPIS (SEQ ID NO: 6364), VPQAL (SEQ ID NO: 6410):SPIS (SEQ ID NO: 6364), VSODL (SEQ ID NO: 6429):SPIS (SEQ ID NO: 6364), VPQDL (SEQ ID NO: 6411):SPIS (SEQ ID NO: 6364), SRVHH (SEQ ID NO: 6382):SPIS (SEQ ID NO: 6364), TQVQL (SEQ ID NO: 6393):SPIS (SEQ ID NO: 6364), VPTEL (SEQ ID NO: 6421):EPIS (SEQ ID NO: 6353), VPTKM (SEQ ID NO: 6424):EPIS (SEQ ID NO: 6353), VPTKL (SEQ ID NO: 6423):EPIS (SEQ ID NO: 6353), VPTQL (SEQ ID NO: 6426):EPIS (SEQ ID NO: 6353), VPTRL (SEQ ID NO: 6427):EPIS (SEQ ID NO: 6353), VPTKT (SEQ ID NO: 6425):EPIS (SEQ ID NO: 6353), VPTAL (SEQ ID NO: 6418):EPIS (SEQ ID NO: 6353), VPTDL (SEQ ID NO: 6419):EPIS (SEQ ID NO: 6353), VPEKM (SEQ ID NO: 6406):EPIS (SEQ ID NO: 6353), APTKL (SEQ ID NO: 6369):EPIS (SEQ ID NO: 6353), APTQL (SEQ ID NO: 6372):EPIS (SEQ ID NO: 6353), TPTKM (SEQ ID NO: 6388):EPIS (SEQ ID NO: 6353), VPARL (SEQ ID NO: 6401):EPIS (SEQ ID NO: 6353), APVKT (SEQ ID NO: 6379):EPIS (SEQ ID NO: 6353), VPQAL (SEQ ID NO: 6410):EPIS (SEQ ID NO: 6353), VSODL (SEQ ID NO: 6429):EPIS (SEQ ID NO: 6353), VPQDL (SEQ ID NO: 6411):EPIS (SEQ ID NO: 6353), SRVHH (SEQ ID NO: 6382):EPIS (SEQ ID NO: 6353), TQVQL (SEQ ID NO: 6393):EPIS (SEQ ID NO: 6353), TPTEL (SEQ ID NO: 6386):SPIN (SEQ ID NO: 6363), TPTKM (SEQ ID NO: 6388):SPIN (SEQ ID NO: 6363), TPTKL (SEQ ID NO: 6387):SPIN (SEQ ID NO: 6363), TPTQL (SEQ ID NO: 6390):SPIN (SEQ ID NO: 6363), TPTRL (SEQ ID NO: 6391):SPIN (SEQ ID NO: 6363), TPTKT (SEQ ID NO: 6389):SPIN (SEQ ID NO: 6363), TPTAL (SEQ ID NO: 6384):SPIN (SEQ ID NO: 6363), TPTDL (SEQ ID NO: 6385):SPIN (SEQ ID NO: 6363), VPTEL (SEQ ID NO: 6421):SPIN (SEQ ID NO: 6363), VPEKM (SEQ ID NO: 6406):SPIN (SEQ ID NO: 6363), APTKL (SEQ ID NO: 6369):SPIN (SEQ ID NO: 6363), APTQL (SEQ ID NO: 6372):SPIN (SEQ ID NO: 6363), VPTKL (SEQ ID NO: 6423):SPIN (SEQ ID NO: 6363), VPARL (SEQ ID NO: 6401):SPIN (SEQ ID NO: 6363), VPTRL (SEQ ID NO: 6427):SPIN (SEQ ID NO: 6363), APVKT (SEQ ID NO: 6379):SPIN (SEQ ID NO: 6363), VPQAL (SEQ ID NO: 6410):SPIN (SEQ ID NO: 6363), VSODL (SEQ ID NO: 6429):SPIN (SEQ ID NO: 6363), VPQDL (SEQ ID NO: 6411):SPIN (SEQ ID NO: 6363), VPTEE (SEQ ID NO: 6420):SPIN (SEQ ID NO: 6363), VPTGQ (SEQ ID NO: 6422):SPIN (SEQ ID NO: 6363), SRVHH (SEQ ID NO: 6382):SPIN (SEQ ID NO: 6363), TQVQL (SEQ ID NO: 6393):SPIN (SEQ ID NO: 6363), VPAEL (SEQ ID NO: 6396):SPIS (SEQ ID NO: 6364), VPAKM (SEQ ID NO: 6398):SPIS (SEQ ID NO: 6364), VPAKL (SEQ ID NO: 6397):SPIS (SEQ ID NO: 6364), VPAQL (SEQ ID NO: 6400):SPIS (SEQ ID NO: 6364), VPAKT (SEQ ID NO: 6399):SPIS (SEQ ID NO: 6364), VPAAL (SEQ ID NO: 6394):SPIS (SEQ ID NO: 6364), VPADL (SEQ ID NO: 6395):SPIS (SEQ ID NO: 6364), VPTEE (SEQ ID NO: 6420):SPIS (SEQ ID NO: 6364), VPTGQ (SEQ ID NO: 6422):SPIS (SEQ ID NO: 6364), APVEL (SEQ ID NO: 6376):KPLS (SEQ ID NO: 6356), APVKM (SEQ ID NO: 6378):KPLS (SEQ ID NO: 6356), APVKL (SEQ ID NO: 6377):KPLS (SEQ ID NO: 6356), APVQL (SEQ ID NO: 6380):KPLS (SEQ ID NO: 6356), APVRL (SEQ ID NO: 6381):KPLS (SEQ ID NO: 6356), APVAL (SEQ ID NO: 6374):KPLS (SEQ ID NO: 6356), APVDL (SEQ ID NO: 6375):KPLS (SEQ ID NO: 6356), VPTEL (SEQ ID NO: 6421):KPLS (SEQ ID NO: 6356), VPEKM (SEQ ID NO: 6406):KPLS (SEQ ID NO: 6356), APTKL (SEQ ID NO: 6369):KPLS (SEQ ID NO: 6356), APTQL (SEQ ID NO: 6372):KPLS (SEQ ID NO: 6356), VPTKL (SEQ ID NO: 6423):KPLS (SEQ ID NO: 6356), TPTKM (SEQ ID NO: 6388):KPLS (SEQ ID NO: 6356), VPARL (SEQ ID NO: 6401):KPLS (SEQ ID NO: 6356), VPTRL (SEQ ID NO: 6427):KPLS (SEQ ID NO: 6356), VPQAL (SEQ ID NO: 6410):KPLS (SEQ ID NO: 6356), VSQDL (SEQ ID NO: 6429):KPLS (SEQ ID NO: 6356), VPQDL (SEQ ID NO: 6411):KPLS (SEQ ID NO: 6356), VPTEE (SEQ ID NO: 6420):KPLS (SEQ ID NO: 6356), VPTGQ (SEQ ID NO: 6422):KPLS (SEQ ID NO: 6356), SRVHH (SEQ ID NO: 6382):KPLS (SEQ ID NO: 6356), TQVQL (SEQ ID NO: 6393):KPLS (SEQ ID NO: 6356), VPQEL (SEQ ID NO: 6412):EPLP (SEQ ID NO: 6354), VPQKM (SEQ ID NO: 6414):EPLP (SEQ ID NO: 6354), VPQKL (SEQ ID NO: 6413):EPLP (SEQ ID NO: 6354), VPQQL (SEQ ID NO: 6416):EPLP (SEQ ID NO: 6354), VPQRL (SEQ ID NO: 6417):EPLP (SEQ ID NO: 6354), VPQKT (SEQ ID NO: 6415):EPLP (SEQ ID NO: 6354), VPQDL (SEQ ID NO: 6411):EPLP (SEQ ID NO: 6354), VPTEL (SEQ ID NO: 6421):EPLP (SEQ ID NO: 6354), VPEKM (SEQ ID NO: 6406):EPLP (SEQ ID NO: 6354), APTKL (SEQ ID NO: 6369):EPLP (SEQ ID NO: 6354), APTOL (SEQ ID NO: 6372):EPLP (SEQ ID NO: 6354), VPTKL (SEQ ID NO: 6423):EPLP (SEQ ID NO: 6354), TPTKM (SEQ ID NO: 6388):EPLP (SEQ ID NO: 6354), VPARL (SEQ ID NO: 6401):EPLP (SEQ ID NO: 6354), VPTRL (SEQ ID NO: 6427):EPLP (SEQ ID NO: 6354), APVKT (SEQ ID NO: 6379):EPLP (SEQ ID NO: 6354), VSODL (SEQ ID NO: 6429):EPLP (SEQ ID NO: 6354), VPTEE (SEQ ID NO: 6420):EPLP (SEQ ID NO: 6354), VPTGQ (SEQ ID NO: 6422):EPLP (SEQ ID NO: 6354), SRVHH (SEQ ID NO: 6382):EPLP (SEQ ID NO: 6354), TQVQL (SEQ ID NO: 6393):EPLP (SEQ ID NO: 6354), VSQEL (SEQ ID NO: 6430):EPLT (SEQ ID NO: 6355), VSQKM (SEQ ID NO: 6432):EPLT (SEQ ID NO: 6355), VSQKL (SEQ ID NO: 6431):EPLT (SEQ ID NO: 6355), VSQQL (SEQ ID NO: 6434):EPLT (SEQ ID NO: 6355), VSQRL (SEQ ID NO: 6435):EPLT (SEQ ID NO: 6355), VSQKT (SEQ ID NO: 6433):EPLT (SEQ ID NO: 6355), VSQAL (SEQ ID NO: 6428):EPLT (SEQ ID NO: 6355), VSODL (SEQ ID NO: 6429):EPLT (SEQ ID NO: 6355), VPTEL (SEQ ID NO: 6421):EPLT (SEQ ID NO: 6355), VPEKM (SEQ ID NO: 6406):EPLT (SEQ ID NO: 6355), APTKL (SEQ ID NO: 6369):EPLT (SEQ ID NO: 6355), APTQL (SEQ ID NO: 6372):EPLT (SEQ ID NO: 6355), VPTKL (SEQ ID NO: 6423):EPLT (SEQ ID NO: 6355), TPTKM (SEQ ID NO: 6388):EPLT (SEQ ID NO: 6355), VPARL (SEQ ID NO: 6401):EPLT (SEQ ID NO: 6355), VPTRL (SEQ ID NO: 6427):EPLT (SEQ ID NO: 6355), APVKT (SEQ ID NO: 6379):EPLT (SEQ ID NO: 6355), VPQAL (SEQ ID NO: 6410):EPLT (SEQ ID NO: 6355), VPTEE (SEQ ID NO: 6420):EPLT (SEQ ID NO: 6355), VPTGQ (SEQ ID NO: 6422):EPLT (SEQ ID NO: 6355), SRVHH (SEQ ID NO: 6382):EPLT (SEQ ID NO: 6355), TQVQL (SEQ ID NO: 6393):EPLT (SEQ ID NO: 6355), VPQEL (SEQ ID NO: 6412):EPLT (SEQ ID NO: 6355), VPQKM (SEQ ID NO: 6414):EPLT (SEQ ID NO: 6355), VPQKL (SEQ ID NO: 6413):EPLT (SEQ ID NO: 6355), VPQQL (SEQ ID NO: 6416):EPLT (SEQ ID NO: 6355), VPQRL (SEQ ID NO: 6417):EPLT (SEQ ID NO: 6355), VPQKT (SEQ ID NO: 6415):EPLT (SEQ ID NO: 6355), VPQDL (SEQ ID NO: 6411):EPLT (SEQ ID NO: 6355), VPTGQ (SEQ ID NO: 6422):SNIT (SEQ ID NO: 6362), VPEKM (SEQ ID NO: 6406):SNIT (SEQ ID NO: 6362), APTKL (SEQ ID NO: 6369):SNIT (SEQ ID NO: 6362), APTQL (SEQ ID NO: 6372):SNIT (SEQ ID NO: 6362), TPTKM (SEQ ID NO: 6388):SNIT (SEQ ID NO: 6362), VPARL (SEQ ID NO: 6401):SNIT (SEQ ID NO: 6362), APVKT (SEQ ID NO: 6379):SNIT (SEQ ID NO: 6362), VPQAL (SEQ ID NO: 6410):SNIT (SEQ ID NO: 6362), VSODL (SEQ ID NO: 6429):SNIT (SEQ ID NO: 6362), VPQDL (SEQ ID NO: 6411):SNIT (SEQ ID NO: 6362), SRVHH (SEQ ID NO: 6382):SNIT (SEQ ID NO: 6362), TQVQL (SEQ ID NO: 6393):SNIT (SEQ ID NO: 6362), SRVQL (SEQ ID NO: 6383):RSVK (SEQ ID NO: 6359), VPTEL (SEQ ID NO: 6421):RSVK (SEQ ID NO: 6359), VPEKM (SEQ ID NO: 6406):RSVK (SEQ ID NO: 6359), APTKL (SEQ ID NO: 6369):RSVK (SEQ ID NO: 6359), APTQL (SEQ ID NO: 6372):RSVK (SEQ ID NO: 6359), VPTKL (SEQ ID NO: 6423):RSVK (SEQ ID NO: 6359), TPTKM (SEQ ID NO: 6388):RSVK (SEQ ID NO: 6359), VPARL (SEQ ID NO: 6401):RSVK (SEQ ID NO: 6359), VPTRL (SEQ ID NO: 6427):RSVK (SEQ ID NO: 6359), APVKT (SEQ ID NO: 6379):RSVK (SEQ ID NO: 6359), VPQAL (SEQ ID NO: 6410):RSVK (SEQ ID NO: 6359), VSODL (SEQ ID NO: 6429):RSVK (SEQ ID NO: 6359), VPQDL (SEQ ID NO: 6411):RSVK (SEQ ID NO: 6359), VPTEE (SEQ ID NO: 6420):RSVK (SEQ ID NO: 6359), VPTGQ (SEQ ID NO: 6422):RSVK (SEQ ID NO: 6359), TQVQL (SEQ ID NO: 6393):RSVK (SEQ ID NO: 6359), TQVHH (SEQ ID NO: 6392):RPVQ (SEQ ID NO: 6358), VPTEL (SEQ ID NO: 6421):RPVQ (SEQ ID NO: 6358), VPEKM (SEQ ID NO: 6406):RPVQ (SEQ ID NO: 6358), APTKL (SEQ ID NO: 6369):RPVQ (SEQ ID NO: 6358), APTQL (SEQ ID NO: 6372):RPVQ (SEQ ID NO: 6358), VPTKL (SEQ ID NO: 6423):RPVQ (SEQ ID NO: 6358), TPTKM (SEQ ID NO: 6388):RPVQ (SEQ ID NO: 6358), VPARL (SEQ ID NO: 6401):RPVQ (SEQ ID NO: 6358), VPTRL (SEQ ID NO: 6427):RPVQ (SEQ ID NO: 6358), APVKT (SEQ ID NO: 6379):RPVQ (SEQ ID NO: 6358), VPQAL (SEQ ID NO: 6410):RPVQ (SEQ ID NO: 6358), VSODL (SEQ ID NO: 6429):RPVQ (SEQ ID NO: 6358), VPQDL (SEQ ID NO: 6411):RPVQ (SEQ ID NO: 6358), VPTEE (SEQ ID NO: 6420):RPVQ (SEQ ID NO: 6358), VPTGQ (SEQ ID NO: 6422):RPVQ (SEQ ID NO: 6358) and SRVHH (SEQ ID NO: 6382):RPVQ (SEQ ID NO: 6358).

[0306] In particular, in certain embodiments, the pair PEP7:PEP1 is selected from the group consisting of GIPEPXX (SEQ ID NO: 6440):SAIS (SEQ ID NO: 6360), HVTKPTX (SEQ ID NO: 6443):SAIS (SEQ ID NO: 6360), YVPKPXX (SEQ ID NO: 6454):SAIS (SEQ ID NO: 6360), TVPKPXX (SEQ ID NO: 6453):SAIS (SEQ ID NO: 6360), AVPKAXX (SEQ ID NO: 6439):SAIS (SEQ ID NO: 6360), KVGKAXX (SEQ ID NO: 6446):SAIS (SEQ ID NO: 6360), KASKAXX (SEQ ID NO: 6444):SAIS (SEQ ID NO: 6360), GSAGPXX (SEQ ID NO: 6441):SAIS (SEQ ID NO: 6360), AAPASXX (SEQ ID NO: 6436):SAIS (SEQ ID NO: 6360), STPPTXX (SEQ ID NO: 6452):SAIS (SEQ ID NO: 6360), HVPKPXX (SEQ ID NO: 6442):SAIS (SEQ ID NO: 6360), RVPSTXX (SEQ ID NO: 6449):SAIS (SEQ ID NO: 6360), ASAAPXX (SEQ ID NO: 6437):SAIS (SEQ ID NO: 6360), ASASPXX (SEQ ID NO: 6438):SAIS (SEQ ID NO: 6360), SSVKXQP (SEQ ID NO: 6451):SAIS (SEQ ID NO: 6360), RNVQXRP (SEQ ID NO: 6448):SAIS (SEQ ID NO: 6360), KIPKAXX (SEQ ID NO: 6445):SSLS (SEQ ID NO: 6365), SIPKAXX (SEQ ID NO: 6450):SSLS (SEQ ID NO: 6365), HVTKPTX (SEQ ID NO: 6443):SSLS (SEQ ID NO: 6365), YVPKPXX (SEQ ID NO: 6454):SSLS (SEQ ID NO: 6365), TVPKPXX (SEQ ID NO: 6453):SSLS (SEQ ID NO: 6365), AVPKAXX (SEQ ID NO: 6439):SSLS (SEQ ID NO: 6365), KVGKAXX (SEQ ID NO: 6446):SSLS (SEQ ID NO: 6365), KASKAXX (SEQ ID NO: 6444):SSLS (SEQ ID NO: 6365), GSAGPXX (SEQ ID NO: 6441):SSLS (SEQ ID NO: 6365), AAPASXX (SEQ ID NO: 6436):SSLS (SEQ ID NO: 6365), STPPTXX (SEQ ID NO: 6452):SSLS (SEQ ID NO: 6365), HVPKPXX (SEQ ID NO: 6442):SSLS (SEQ ID NO: 6365), RVPSTXX (SEQ ID NO: 6449):SSLS (SEQ ID NO: 6365), ASAAPXX (SEQ ID NO: 6437):SSLS (SEQ ID NO: 6365), ASASPXX (SEQ ID NO: 6438):SSLS (SEQ ID NO: 6365), NDEGLEX (SEQ ID NO: 6447):SSLS (SEQ ID NO: 6365), SSVKXQP (SEQ ID NO: 6451):SSLS (SEQ ID NO: 6365), RNVQXRP (SEQ ID NO: 6448):SSLS (SEQ ID NO: 6365), KIPKAXX (SEQ ID NO: 6445):NAIS (SEQ ID NO: 6357), GIPEPXX (SEQ ID NO: 6440):NAIS (SEQ ID NO: 6357), SIPKAXX (SEQ ID NO: 6450):NAIS (SEQ ID NO: 6357), AVPKAXX (SEQ ID NO: 6439):NAIS (SEQ ID NO: 6357), KVGKAXX (SEQ ID NO: 6446):NAIS (SEQ ID NO: 6357), KASKAXX (SEQ ID NO: 6444):NAIS (SEQ ID NO: 6357), GSAGPXX (SEQ ID NO: 6441):NAIS (SEQ ID NO: 6357), AAPASXX (SEQ ID NO: 6436):NAIS (SEQ ID NO: 6357), STPPTXX (SEQ ID NO: 6452):NAIS (SEQ ID NO: 6357), RVPSTXX (SEQ ID NO: 6449):NAIS (SEQ ID NO: 6357), ASAAPXX (SEQ ID NO: 6437):NAIS (SEQ ID NO: 6357), ASASPXX (SEQ ID NO: 6438):NAIS (SEQ ID NO: 6357), NDEGLEX (SEQ ID NO: 6447):NAIS (SEQ ID NO: 6357), SSVKXQP (SEQ ID NO: 6451):NAIS (SEQ ID NO: 6357), RNVQXRP (SEQ ID NO: 6448):NAIS (SEQ ID NO: 6357), KIPKAXX (SEQ ID NO: 6445):SATS (SEQ ID NO: 6361), GIPEPXX (SEQ ID NO: 6440):SATS (SEQ ID NO: 6361), SIPKAXX (SEQ ID NO: 6450):SATS (SEQ ID NO: 6361), HVTKPTX (SEQ ID NO: 6443):SATS (SEQ ID NO: 6361), YVPKPXX (SEQ ID NO: 6454):SATS (SEQ ID NO: 6361), TVPKPXX (SEQ ID NO: 6453):SATS (SEQ ID NO: 6361), KVGKAXX (SEQ ID NO: 6446):SATS (SEQ ID NO: 6361), KASKAXX (SEQ ID NO: 6444):SATS (SEQ ID NO: 6361), GSAGPXX (SEQ ID NO: 6441):SATS (SEQ ID NO: 6361), AAPASXX (SEQ ID NO: 6436):SATS (SEQ ID NO: 6361), STPPTXX (SEQ ID NO: 6452):SATS (SEQ ID NO: 6361), HVPKPXX (SEQ ID NO: 6442):SATS (SEQ ID NO: 6361), RVPSTXX (SEQ ID NO: 6449):SATS (SEQ ID NO: 6361), ASAAPXX (SEQ ID NO: 6437):SATS (SEQ ID NO: 6361), ASASPXX (SEQ ID NO: 6438):SATS (SEQ ID NO: 6361), NDEGLEX (SEQ ID NO: 6447):SATS (SEQ ID NO: 6361), SSVKXQP (SEQ ID NO: 6451):SATS (SEQ ID NO: 6361), RNVQXRP (SEQ ID NO: 6448):SATS (SEQ ID NO: 6361), KIPKAXX (SEQ ID NO: 6445):SPIS (SEQ ID NO: 6364), GIPEPXX (SEQ ID NO: 6440):SPIS (SEQ ID NO: 6364), SIPKAXX (SEQ ID NO: 6450):SPIS (SEQ ID NO: 6364), HVTKPTX (SEQ ID NO: 6443):SPIS (SEQ ID NO: 6364), YVPKPXX (SEQ ID NO: 6454):SPIS (SEQ ID NO: 6364), TVPKPXX (SEQ ID NO: 6453):SPIS (SEQ ID NO: 6364), AVPKAXX (SEQ ID NO: 6439):SPIS (SEQ ID NO: 6364), KASKAXX (SEQ ID NO: 6444):SPIS (SEQ ID NO: 6364), GSAGPXX (SEQ ID NO: 6441):SPIS (SEQ ID NO: 6364), AAPASXX (SEQ ID NO: 6436):SPIS (SEQ ID NO: 6364), STPPTXX (SEQ ID NO: 6452):SPIS (SEQ ID NO: 6364), HVPKPXX (SEQ ID NO: 6442):SPIS (SEQ ID NO: 6364), RVPSTXX (SEQ ID NO: 6449):SPIS (SEQ ID NO: 6364), ASAAPXX (SEQ ID NO: 6437):SPIS (SEQ ID NO: 6364), ASASPXX (SEQ ID NO: 6438):SPIS (SEQ ID NO: 6364), SSVKXQP (SEQ ID NO: 6451):SPIS (SEQ ID NO: 6364), RNVQXRP (SEQ ID NO: 6448):SPIS (SEQ ID NO: 6364), KIPKAXX (SEQ ID NO: 6445):EPIS (SEQ ID NO: 6353), GIPEPXX (SEQ ID NO: 6440):EPIS (SEQ ID NO: 6353), SIPKAXX (SEQ ID NO: 6450):EPIS (SEQ ID NO: 6353), HVTKPTX (SEQ ID NO: 6443):EPIS (SEQ ID NO: 6353), YVPKPXX (SEQ ID NO: 6454):EPIS (SEQ ID NO: 6353), TVPKPXX (SEQ ID NO: 6453):EPIS (SEQ ID NO: 6353), AVPKAXX (SEQ ID NO: 6439):EPIS (SEQ ID NO: 6353), KVGKAXX (SEQ ID NO: 6446):EPIS (SEQ ID NO: 6353), GSAGPXX (SEQ ID NO: 6441):EPIS (SEQ ID NO: 6353), AAPASXX (SEQ ID NO: 6436):EPIS (SEQ ID NO: 6353), STPPTXX (SEQ ID NO: 6452):EPIS (SEQ ID NO: 6353), HVPKPXX (SEQ ID NO: 6442):EPIS (SEQ ID NO: 6353), RVPSTXX (SEQ ID NO: 6449):EPIS (SEQ ID NO: 6353), ASAAPXX (SEQ ID NO: 6437):EPIS (SEQ ID NO: 6353), ASASPXX (SEQ ID NO: 6438):EPIS (SEQ ID NO: 6353), SSVKXQP (SEQ ID NO: 6451):EPIS (SEQ ID NO: 6353), RNVQXRP (SEQ ID NO: 6448):EPIS (SEQ ID NO: 6353), KIPKAXX (SEQ ID NO: 6445):SPIN (SEQ ID NO: 6363), GIPEPXX (SEQ ID NO: 6440):SPIN (SEQ ID NO: 6363), SIPKAXX (SEQ ID NO: 6450):SPIN (SEQ ID NO: 6363), HVTKPTX (SEQ ID NO: 6443):SPIN (SEQ ID NO: 6363), YVPKPXX (SEQ ID NO: 6454):SPIN (SEQ ID NO: 6363), TVPKPXX (SEQ ID NO: 6453):SPIN (SEQ ID NO: 6363), AVPKAXX (SEQ ID NO: 6439):SPIN (SEQ ID NO: 6363), KVGKAXX (SEQ ID NO: 6446):SPIN (SEQ ID NO: 6363), KASKAXX (SEQ ID NO: 6444):SPIN (SEQ ID NO: 6363), AAPASXX (SEQ ID NO: 6436):SPIN (SEQ ID NO: 6363), STPPTXX (SEQ ID NO: 6452):SPIN (SEQ ID NO: 6363), HVPKPXX (SEQ ID NO: 6442):SPIN (SEQ ID NO: 6363), RVPSTXX (SEQ ID NO: 6449):SPIN (SEQ ID NO: 6363), ASAAPXX (SEQ ID NO: 6437):SPIN (SEQ ID NO: 6363), ASASPXX (SEQ ID NO: 6438):SPIN (SEQ ID NO: 6363), NDEGLEX (SEQ ID NO: 6447):SPIN (SEQ ID NO: 6363), SSVKXQP (SEQ ID NO: 6451):SPIN (SEQ ID NO: 6363), RNVQXRP (SEQ ID NO: 6448):SPIN (SEQ ID NO: 6363), KVGKAXX (SEQ ID NO: 6446):SPIS (SEQ ID NO: 6364), NDEGLEX (SEQ ID NO: 6447):SPIS (SEQ ID NO: 6364), KIPKAXX (SEQ ID NO: 6445):KPLS (SEQ ID NO: 6356), GIPEPXX (SEQ ID NO: 6440):KPLS (SEQ ID NO: 6356), SIPKAXX (SEQ ID NO: 6450):KPLS (SEQ ID NO: 6356), HVTKPTX (SEQ ID NO: 6443):KPLS (SEQ ID NO: 6356), YVPKPXX (SEQ ID NO: 6454):KPLS (SEQ ID NO: 6356), TVPKPXX (SEQ ID NO: 6453):KPLS (SEQ ID NO: 6356), AVPKAXX (SEQ ID NO: 6439):KPLS (SEQ ID NO: 6356), KVGKAXX (SEQ ID NO: 6446):KPLS (SEQ ID NO: 6356), KASKAXX (SEQ ID NO: 6444):KPLS (SEQ ID NO: 6356), GSAGPXX (SEQ ID NO: 6441):KPLS (SEQ ID NO: 6356), AAPASXX (SEQ ID NO: 6436):KPLS (SEQ ID NO: 6356), STPPTXX (SEQ ID NO: 6452):KPLS (SEQ ID NO: 6356), HVPKPXX (SEQ ID NO: 6442):KPLS (SEQ ID NO: 6356), ASAAPXX (SEQ ID NO: 6437):KPLS (SEQ ID NO: 6356), ASASPXX (SEQ ID NO: 6438):KPLS (SEQ ID NO: 6356), NDEGLEX (SEQ ID NO: 6447):KPLS (SEQ ID NO: 6356), SSVKXQP (SEQ ID NO: 6451):KPLS (SEQ ID NO: 6356), RNVQXRP (SEQ ID NO: 6448):KPLS (SEQ ID NO: 6356), KIPKAXX (SEQ ID NO: 6445):EPLP (SEQ ID NO: 6354), GIPEPXX (SEQ ID NO: 6440):EPLP (SEQ ID NO: 6354), SIPKAXX (SEQ ID NO: 6450):EPLP (SEQ ID NO: 6354), HVTKPTX (SEQ ID NO: 6443):EPLP (SEQ ID NO: 6354), YVPKPXX (SEQ ID NO: 6454):EPLP (SEQ ID NO: 6354), TVPKPXX (SEQ ID NO: 6453):EPLP (SEQ ID NO: 6354), AVPKAXX (SEQ ID NO: 6439):EPLP (SEQ ID NO: 6354), KVGKAXX (SEQ ID NO: 6446):EPLP (SEQ ID NO: 6354), KASKAXX (SEQ ID NO: 6444):EPLP (SEQ ID NO: 6354), GSAGPXX (SEQ ID NO: 6441):EPLP (SEQ ID NO: 6354), AAPASXX (SEQ ID NO: 6436):EPLP (SEQ ID NO: 6354), STPPTXX (SEQ ID NO: 6452):EPLP (SEQ ID NO: 6354), HVPKPXX (SEQ ID NO: 6442):EPLP (SEQ ID NO: 6354), RVPSTXX (SEQ ID NO: 6449):EPLP (SEQ ID NO: 6354), ASASPXX (SEQ ID NO: 6438):EPLP (SEQ ID NO: 6354), NDEGLEX (SEQ ID NO: 6447):EPLP (SEQ ID NO: 6354), SSVKXQP (SEQ ID NO: 6451):EPLP (SEQ ID NO: 6354), RNVQXRP (SEQ ID NO: 6448):EPLP (SEQ ID NO: 6354), KIPKAXX (SEQ ID NO: 6445):EPLT (SEQ ID NO: 6355), GIPEPXX (SEQ ID NO: 6440):EPLT (SEQ ID NO: 6355), SIPKAXX (SEQ ID NO: 6450):EPLT (SEQ ID NO: 6355), HVTKPTX (SEQ ID NO: 6443):EPLT (SEQ ID NO: 6355), YVPKPXX (SEQ ID NO: 6454):EPLT (SEQ ID NO: 6355), TVPKPXX (SEQ ID NO: 6453):EPLT (SEQ ID NO: 6355), AVPKAXX (SEQ ID NO: 6439):EPLT (SEQ ID NO: 6355), KVGKAXX (SEQ ID NO: 6446):EPLT (SEQ ID NO: 6355), KASKAXX (SEQ ID NO: 6444):EPLT (SEQ ID NO: 6355), GSAGPXX (SEQ ID NO: 6441):EPLT (SEQ ID NO: 6355), AAPASXX (SEQ ID NO: 6436):EPLT (SEQ ID NO: 6355), STPPTXX (SEQ ID NO: 6452):EPLT (SEQ ID NO: 6355), HVPKPXX (SEQ ID NO: 6442):EPLT (SEQ ID NO: 6355), RVPSTXX (SEQ ID NO: 6449):EPLT (SEQ ID NO: 6355), ASAAPXX (SEQ ID NO: 6437):EPLT (SEQ ID NO: 6355), ASASPXX (SEQ ID NO: 6438):EPLT (SEQ ID NO: 6355), NDEGLEX (SEQ ID NO: 6447):EPLT (SEQ ID NO: 6355), SSVKXQP (SEQ ID NO: 6451):EPLT (SEQ ID NO: 6355), RNVQXRP (SEQ ID NO: 6448):EPLT (SEQ ID NO: 6355), NDEGLEX (SEQ ID NO: 6447):SNIT (SEQ ID NO: 6362), GIPEPXX (SEQ ID NO: 6440):SNIT (SEQ ID NO: 6362), HVTKPTX (SEQ ID NO: 6443):SNIT (SEQ ID NO: 6362), YVPKPXX (SEQ ID NO: 6454):SNIT (SEQ ID NO: 6362), TVPKPXX (SEQ ID NO: 6453):SNIT (SEQ ID NO: 6362), AVPKAXX (SEQ ID NO: 6439):SNIT (SEQ ID NO: 6362), GSAGPXX (SEQ ID NO: 6441):SNIT (SEQ ID NO: 6362), AAPASXX (SEQ ID NO: 6436):SNIT (SEQ ID NO: 6362), HVPKPXX (SEQ ID NO: 6442):SNIT (SEQ ID NO: 6362), RVPSTXX (SEQ ID NO: 6449):SNIT (SEQ ID NO: 6362), ASAAPXX (SEQ ID NO: 6437):SNIT (SEQ ID NO: 6362), ASASPXX (SEQ ID NO: 6438):SNIT (SEQ ID NO: 6362), SSVKXQP (SEQ ID NO: 6451):SNIT (SEQ ID NO: 6362), RNVQXRP (SEQ ID NO: 6448):SNIT (SEQ ID NO: 6362), RNVQXRP (SEQ ID NO: 6448):RSVK (SEQ ID NO: 6359), KIPKAXX (SEQ ID NO: 6445):RSVK (SEQ ID NO: 6359), GIPEPXX (SEQ ID NO: 6440):RSVK (SEQ ID NO: 6359), SIPKAXX (SEQ ID NO: 6450):RSVK (SEQ ID NO: 6359), HVTKPTX (SEQ ID NO: 6443):RSVK (SEQ ID NO: 6359), YVPKPXX (SEQ ID NO: 6454):RSVK (SEQ ID NO: 6359), TVPKPXX (SEQ ID NO: 6453):RSVK (SEQ ID NO: 6359), AVPKAXX (SEQ ID NO: 6439):RSVK (SEQ ID NO: 6359), KVGKAXX (SEQ ID NO: 6446):RSVK (SEQ ID NO: 6359), KASKAXX (SEQ ID NO: 6444):RSVK (SEQ ID NO: 6359), GSAGPXX (SEQ ID NO: 6441):RSVK (SEQ ID NO: 6359), AAPASXX (SEQ ID NO: 6436):RSVK (SEQ ID NO: 6359), STPPTXX (SEQ ID NO: 6452):RSVK (SEQ ID NO: 6359), HVPKPXX (SEQ ID NO: 6442):RSVK (SEQ ID NO: 6359), RVPSTXX (SEQ ID NO: 6449):RSVK (SEQ ID NO: 6359), ASAAPXX (SEQ ID NO: 6437):RSVK (SEQ ID NO: 6359), ASASPXX (SEQ ID NO: 6438):RSVK (SEQ ID NO: 6359), NDEGLEX (SEQ ID NO: 6447):RSVK (SEQ ID NO: 6359), SSVKXQP (SEQ ID NO: 6451):RPVQ (SEQ ID NO: 6358), KIPKAXX (SEQ ID NO: 6445):RPVQ (SEQ ID NO: 6358), GIPEPXX (SEQ ID NO: 6440):RPVQ (SEQ ID NO: 6358), SIPKAXX (SEQ ID NO: 6450):RPVQ (SEQ ID NO: 6358), HVTKPTX (SEQ ID NO: 6443):RPVQ (SEQ ID NO: 6358), YVPKPXX (SEQ ID NO: 6454):RPVQ (SEQ ID NO: 6358), TVPKPXX (SEQ ID NO: 6453):RPVQ (SEQ ID NO: 6358), AVPKAXX (SEQ ID NO: 6439):RPVQ (SEQ ID NO: 6358), KVGKAXX (SEQ ID NO: 6446):RPVQ (SEQ ID NO: 6358), KASKAXX (SEQ ID NO: 6444):RPVQ (SEQ ID NO: 6358), GSAGPXX (SEQ ID NO: 6441):RPVQ (SEQ ID NO: 6358), AAPASXX (SEQ ID NO: 6436):RPVQ (SEQ ID NO: 6358), STPPTXX (SEQ ID NO: 6452):RPVQ (SEQ ID NO: 6358), HVPKPXX (SEQ ID NO: 6442):RPVQ (SEQ ID NO: 6358), RVPSTXX (SEQ ID NO: 6449):RPVQ (SEQ ID NO: 6358), ASAAPXX (SEQ ID NO: 6437):RPVQ (SEQ ID NO: 6358), ASASPXX (SEQ ID NO: 6438):RPVQ (SEQ ID NO: 6358) and NDEGLEX (SEQ ID NO: 6447):RPVQ (SEQ ID NO: 6358).

[0307] In particular, in certain embodiments, the pair PEP9:PEP1 is selected from the group consisting of GIPEPXXVPTKM (SEQ ID NO: 6493):SAIS (SEQ ID NO: 6360), HVTKPTXVPTKL (SEQ ID NO: 6519):SAIS (SEQ ID NO: 6360), YVPKPXXVPTKL (SEQ ID NO: 6589):SAIS (SEQ ID NO: 6360), TVPKPXXVPTQL (SEQ ID NO: 6581):SAIS (SEQ ID NO: 6360), AVPKAXXVPTKL (SEQ ID NO: 6485):SAIS (SEQ ID NO: 6360), KVGKAXXVPTKL (SEQ ID NO: 6543):SAIS (SEQ ID NO: 6360), KASKAXXVPTKL (SEQ ID NO: 6527):SAIS (SEQ ID NO: 6360), GSAGPXXVPTKM (SEQ ID NO: 6501):SAIS (SEQ ID NO: 6360), AAPASXXVPTRL (SEQ ID NO: 6461):SAIS (SEQ ID NO: 6360), STPPTXXVPTRL (SEQ ID NO: 6573):SAIS (SEQ ID NO: 6360), HVPKPXXVPTKL (SEQ ID NO: 6509):SAIS (SEQ ID NO: 6360), RVPSTXXVPTKT (SEQ ID NO: 6555):SAIS (SEQ ID NO: 6360), ASAAPXXVPTAL (SEQ ID NO: 6469):SAIS (SEQ ID NO: 6360), ASASPXXVPTDL (SEQ ID NO: 6477):SAIS (SEQ ID NO: 6360), GIPEPXXVPEKM (SEQ ID NO: 6491):SAIS (SEQ ID NO: 6360), HVTKPTXAPTKL (SEQ ID NO: 6511):SAIS (SEQ ID NO: 6360), YVPKPXXAPTKL (SEQ ID NO: 6583):SAIS (SEQ ID NO: 6360), TVPKPXXAPTQL (SEQ ID NO: 6575):SAIS (SEQ ID NO: 6360), AVPKAXXAPTKL (SEQ ID NO: 6479):SAIS (SEQ ID NO: 6360), GSAGPXXTPTKM (SEQ ID NO: 6497):SAIS (SEQ ID NO: 6360), AAPASXXVPARL (SEQ ID NO: 6458):SAIS (SEQ ID NO: 6360), HVPKPXXAPTKL (SEQ ID NO: 6503):SAIS (SEQ ID NO: 6360), RVPSTXXAPVKT (SEQ ID NO: 6550):SAIS (SEQ ID NO: 6360), ASAAPXXVPQAL (SEQ ID NO: 6468):SAIS (SEQ ID NO: 6360), ASASPXXVSQDL (SEQ ID NO: 6478):SAIS (SEQ ID NO: 6360), ASASPXXVPQDL (SEQ ID NO: 6476):SAIS (SEQ ID NO: 6360), SSVKXQPSRVHH (SEQ ID NO: 6565):SAIS (SEQ ID NO: 6360), RNVQXRPTQVQL (SEQ ID NO: 6548):SAIS (SEQ ID NO: 6360), KIPKAXXVPEEL (SEQ ID NO: 6533):SSLS (SEQ ID NO: 6365), SIPKAXXVPEEL (SEQ ID NO: 6561):SSLS (SEQ ID NO: 6365), HVTKPTXVPEKL (SEQ ID NO: 6517):SSLS (SEQ ID NO: 6365), YVPKPXXVPEKL (SEQ ID NO: 6587):SSLS (SEQ ID NO: 6365), TVPKPXXVPEQL (SEQ ID NO: 6579):SSLS (SEQ ID NO: 6365), AVPKAXXVPEKL (SEQ ID NO: 6483):SSLS (SEQ ID NO: 6365), KVGKAXXVPEKL (SEQ ID NO: 6541):SSLS (SEQ ID NO: 6365), KASKAXXVPEKL (SEQ ID NO: 6525):SSLS (SEQ ID NO: 6365), GSAGPXXVPEKM (SEQ ID NO: 6499):SSLS (SEQ ID NO: 6365), AAPASXXVPERL (SEQ ID NO: 6459):SSLS (SEQ ID NO: 6365), STPPTXXVPERL (SEQ ID NO: 6571):SSLS (SEQ ID NO: 6365), HVPKPXXVPEKL (SEQ ID NO: 6507):SSLS (SEQ ID NO: 6365), RVPSTXXVPEKT (SEQ ID NO: 6553):SSLS (SEQ ID NO: 6365), ASAAPXXVPEAL (SEQ ID NO: 6467):SSLS (SEQ ID NO: 6365), ASASPXXVPEDL (SEQ ID NO: 6475):SSLS (SEQ ID NO: 6365), KIPKAXXVPTEL (SEQ ID NO: 6535):SSLS (SEQ ID NO: 6365), SIPKAXXVPTEL (SEQ ID NO: 6563):SSLS (SEQ ID NO: 6365), HVTKPTXAPTKL (SEQ ID NO: 6511):SSLS (SEQ ID NO: 6365), YVPKPXXAPTKL (SEQ ID NO: 6583):SSLS (SEQ ID NO: 6365), TVPKPXXAPTQL (SEQ ID NO: 6575):SSLS (SEQ ID NO: 6365), AVPKAXXAPTKL (SEQ ID NO: 6479):SSLS (SEQ ID NO: 6365), KVGKAXXVPTKL (SEQ ID NO: 6543):SSLS (SEQ ID NO: 6365), KASKAXXVPTKL (SEQ ID NO: 6527):SSLS (SEQ ID NO: 6365), GSAGPXXTPTKM (SEQ ID NO: 6497):SSLS (SEQ ID NO: 6365), AAPASXXVPARL (SEQ ID NO: 6458):SSLS (SEQ ID NO: 6365), STPPTXXVPTRL (SEQ ID NO: 6573):SSLS (SEQ ID NO: 6365), HVPKPXXAPTKL (SEQ ID NO: 6503):SSLS (SEQ ID NO: 6365), RVPSTXXAPVKT (SEQ ID NO: 6550):SSLS (SEQ ID NO: 6365), ASAAPXXVPQAL (SEQ ID NO: 6468):SSLS (SEQ ID NO: 6365), ASASPXXVSQDL (SEQ ID NO: 6478):SSLS (SEQ ID NO: 6365), ASASPXXVPQDL (SEQ ID NO: 6476):SSLS (SEQ ID NO: 6365), NDEGLEXVPTEE (SEQ ID NO: 6545):SSLS (SEQ ID NO: 6365), NDEGLEXVPTGQ (SEQ ID NO: 6546):SSLS (SEQ ID NO: 6365), SSVKXQPSRVHH (SEQ ID NO: 6565):SSLS (SEQ ID NO: 6365), RNVQXRPTQVQL (SEQ ID NO: 6548):SSLS (SEQ ID NO: 6365), KIPKAXXAPTEL (SEQ ID NO: 6529):NAIS (SEQ ID NO: 6357), GIPEPXXAPTKM (SEQ ID NO: 6487):NAIS (SEQ ID NO: 6357), SIPKAXXAPTEL (SEQ ID NO: 6557):NAIS (SEQ ID NO: 6357), AVPKAXXAPTKL (SEQ ID NO: 6479):NAIS (SEQ ID NO: 6357), KVGKAXXAPTKL (SEQ ID NO: 6537):NAIS (SEQ ID NO: 6357), KASKAXXAPTKL (SEQ ID NO: 6521):NAIS (SEQ ID NO: 6357), GSAGPXXAPTKM (SEQ ID NO: 6495):NAIS (SEQ ID NO: 6357), AAPASXXAPTRL (SEQ ID NO: 6455):NAIS (SEQ ID NO: 6357), STPPTXXAPTRL (SEQ ID NO: 6567):NAIS (SEQ ID NO: 6357), RVPSTXXAPTKT (SEQ ID NO: 6549):NAIS (SEQ ID NO: 6357), ASAAPXXAPTAL (SEQ ID NO: 6463):NAIS (SEQ ID NO: 6357), ASASPXXAPTDL (SEQ ID NO: 6471):NAIS (SEQ ID NO: 6357), KIPKAXXVPTEL (SEQ ID NO: 6535):NAIS (SEQ ID NO: 6357), GIPEPXXVPEKM (SEQ ID NO: 6491):NAIS (SEQ ID NO: 6357), SIPKAXXVPTEL (SEQ ID NO: 6563):NAIS (SEQ ID NO: 6357), KVGKAXXVPTKL (SEQ ID NO: 6543):NAIS (SEQ ID NO: 6357), KASKAXXVPTKL (SEQ ID NO: 6527):NAIS (SEQ ID NO: 6357), GSAGPXXTPTKM (SEQ ID NO: 6497):NAIS (SEQ ID NO: 6357), AAPASXXVPARL (SEQ ID NO: 6458):NAIS (SEQ ID NO: 6357), STPPTXXVPTRL (SEQ ID NO: 6573):NAIS (SEQ ID NO: 6357), RVPSTXXAPVKT (SEQ ID NO: 6550):NAIS (SEQ ID NO: 6357), ASAAPXXVPQAL (SEQ ID NO: 6468):NAIS (SEQ ID NO: 6357), ASASPXXVSQDL (SEQ ID NO: 6478):NAIS (SEQ ID NO: 6357), ASASPXXVPQDL (SEQ ID NO: 6476):NAIS (SEQ ID NO: 6357), NDEGLEXVPTEE (SEQ ID NO: 6545):NAIS (SEQ ID NO: 6357), NDEGLEXVPTGQ (SEQ ID NO: 6546):NAIS (SEQ ID NO: 6357), SSVKXQPSRVHH (SEQ ID NO: 6565):NAIS (SEQ ID NO: 6357), RNVQXRPTQVQL (SEQ ID NO: 6548):NAIS (SEQ ID NO: 6357), KIPKAXXAPTEL (SEQ ID NO: 6529):SATS (SEQ ID NO: 6361), GIPEPXXAPTKM (SEQ ID NO: 6487):SATS (SEQ ID NO: 6361), SIPKAXXAPTEL (SEQ ID NO: 6557):SATS (SEQ ID NO: 6361), HVTKPTXAPTKL (SEQ ID NO: 6511):SATS (SEQ ID NO: 6361), YVPKPXXAPTKL (SEQ ID NO: 6583):SATS (SEQ ID NO: 6361), TVPKPXXAPTQL (SEQ ID NO: 6575):SATS (SEQ ID NO: 6361), KVGKAXXAPTKL (SEQ ID NO: 6537):SATS (SEQ ID NO: 6361), KASKAXXAPTKL (SEQ ID NO: 6521):SATS (SEQ ID NO: 6361), GSAGPXXAPTKM (SEQ ID NO: 6495):SATS (SEQ ID NO: 6361), AAPASXXAPTRL (SEQ ID NO: 6455):SATS (SEQ ID NO: 6361), STPPTXXAPTRL (SEQ ID NO: 6567):SATS (SEQ ID NO: 6361), HVPKPXXAPTKL (SEQ ID NO: 6503):SATS (SEQ ID NO: 6361), RVPSTXXAPTKT (SEQ ID NO: 6549):SATS (SEQ ID NO: 6361), ASAAPXXAPTAL (SEQ ID NO: 6463):SATS (SEQ ID NO: 6361), ASASPXXAPTDL (SEQ ID NO: 6471):SATS (SEQ ID NO: 6361), KIPKAXXVPTEL (SEQ ID NO: 6535):SATS (SEQ ID NO: 6361), GIPEPXXVPEKM (SEQ ID NO: 6491):SATS (SEQ ID NO: 6361), SIPKAXXVPTEL (SEQ ID NO: 6563):SATS (SEQ ID NO: 6361), KVGKAXXVPTKL (SEQ ID NO: 6543):SATS (SEQ ID NO: 6361), KASKAXXVPTKL (SEQ ID NO: 6527):SATS (SEQ ID NO: 6361), GSAGPXXTPTKM (SEQ ID NO: 6497):SATS (SEQ ID NO: 6361), AAPASXXVPARL (SEQ ID NO: 6458):SATS (SEQ ID NO: 6361), STPPTXXVPTRL (SEQ ID NO: 6573):SATS (SEQ ID NO: 6361), RVPSTXXAPVKT (SEQ ID NO: 6550):SATS (SEQ ID NO: 6361), ASAAPXXVPQAL (SEQ ID NO: 6468):SATS (SEQ ID NO: 6361), ASASPXXVSQDL (SEQ ID NO: 6478):SATS (SEQ ID NO: 6361), ASASPXXVPQDL (SEQ ID NO: 6476):SATS (SEQ ID NO: 6361), NDEGLEXVPTEE (SEQ ID NO: 6545):SATS (SEQ ID NO: 6361), NDEGLEXVPTGQ (SEQ ID NO: 6546):SATS (SEQ ID NO: 6361), SSVKXQPSRVHH (SEQ ID NO: 6565):SATS (SEQ ID NO: 6361), RNVQXRPTQVQL (SEQ ID NO: 6548):SATS (SEQ ID NO: 6361), KIPKAXXVPTEL (SEQ ID NO: 6535):SPIS (SEQ ID NO: 6364), GIPEPXXVPTKM (SEQ ID NO: 6493):SPIS (SEQ ID NO: 6364), SIPKAXXVPTEL (SEQ ID NO: 6563):SPIS (SEQ ID NO: 6364), HVTKPTXVPTKL (SEQ ID NO: 6519):SPIS (SEQ ID NO: 6364), YVPKPXXVPTKL (SEQ ID NO: 6589):SPIS (SEQ ID NO: 6364), TVPKPXXVPTQL (SEQ ID NO: 6581):SPIS (SEQ ID NO: 6364), AVPKAXXVPTKL (SEQ ID NO: 6485):SPIS (SEQ ID NO: 6364), KASKAXXVPTKL (SEQ ID NO: 6527):SPIS (SEQ ID NO: 6364), GSAGPXXVPTKM (SEQ ID NO: 6501):SPIS (SEQ ID NO: 6364), AAPASXXVPTRL (SEQ ID NO: 6461):SPIS (SEQ ID NO: 6364), STPPTXXVPTRL (SEQ ID NO: 6573):SPIS (SEQ ID NO: 6364), HVPKPXXVPTKL (SEQ ID NO: 6509):SPIS (SEQ ID NO: 6364), RVPSTXXVPTKT (SEQ ID NO: 6555):SPIS (SEQ ID NO: 6364), ASAAPXXVPTAL (SEQ ID NO: 6469):SPIS (SEQ ID NO: 6364), ASASPXXVPTDL (SEQ ID NO: 6477):SPIS (SEQ ID NO: 6364), GIPEPXXVPEKM (SEQ ID NO: 6491):SPIS (SEQ ID NO: 6364), HVTKPTXAPTKL (SEQ ID NO: 6511):SPIS (SEQ ID NO: 6364), YVPKPXXAPTKL (SEQ ID NO: 6583):SPIS (SEQ ID NO: 6364), TVPKPXXAPTQL (SEQ ID NO: 6575):SPIS (SEQ ID NO: 6364), AVPKAXXAPTKL (SEQ ID NO: 6479):SPIS (SEQ ID NO: 6364), GSAGPXXTPTKM (SEQ ID NO: 6497):SPIS (SEQ ID NO: 6364), AAPASXXVPARL (SEQ ID NO: 6458):SPIS (SEQ ID NO: 6364), HVPKPXXAPTKL (SEQ ID NO: 6503):SPIS (SEQ ID NO: 6364), RVPSTXXAPVKT (SEQ ID NO: 6550):SPIS (SEQ ID NO: 6364), ASAAPXXVPQAL (SEQ ID NO: 6468):SPIS (SEQ ID NO: 6364), ASASPXXVSQDL (SEQ ID NO: 6478):SPIS (SEQ ID NO: 6364), ASASPXXVPQDL (SEQ ID NO: 6476):SPIS (SEQ ID NO: 6364), SSVKXQPSRVHH (SEQ ID NO: 6565):SPIS (SEQ ID NO: 6364), RNVQXRPTQVQL (SEQ ID NO: 6548):SPIS (SEQ ID NO: 6364), KIPKAXXVPTEL (SEQ ID NO: 6535):EPIS (SEQ ID NO: 6353), GIPEPXXVPTKM (SEQ ID NO: 6493):EPIS (SEQ ID NO: 6353), SIPKAXXVPTEL (SEQ ID NO: 6563):EPIS (SEQ ID NO: 6353), HVTKPTXVPTKL (SEQ ID NO: 6519):EPIS (SEQ ID NO: 6353), YVPKPXXVPTKL (SEQ ID NO: 6589):EPIS (SEQ ID NO: 6353), TVPKPXXVPTQL (SEQ ID NO: 6581):EPIS (SEQ ID NO: 6353), AVPKAXXVPTKL (SEQ ID NO: 6485):EPIS (SEQ ID NO: 6353), KVGKAXXVPTKL (SEQ ID NO: 6543):EPIS (SEQ ID NO: 6353), GSAGPXXVPTKM (SEQ ID NO: 6501):EPIS (SEQ ID NO: 6353), AAPASXXVPTRL (SEQ ID NO: 6461):EPIS (SEQ ID NO: 6353), STPPTXXVPTRL (SEQ ID NO: 6573):EPIS (SEQ ID NO: 6353), HVPKPXXVPTKL (SEQ ID NO: 6509):EPIS (SEQ ID NO: 6353), RVPSTXXVPTKT (SEQ ID NO: 6555):EPIS (SEQ ID NO: 6353), ASAAPXXVPTAL (SEQ ID NO: 6469):EPIS (SEQ ID NO: 6353), ASASPXXVPTDL (SEQ ID NO: 6477):EPIS (SEQ ID NO: 6353), GIPEPXXVPEKM (SEQ ID NO: 6491):EPIS (SEQ ID NO: 6353), HVTKPTXAPTKL (SEQ ID NO: 6511):EPIS (SEQ ID NO: 6353), YVPKPXXAPTKL (SEQ ID NO: 6583):EPIS (SEQ ID NO: 6353), TVPKPXXAPTQL (SEQ ID NO: 6575):EPIS (SEQ ID NO: 6353), AVPKAXXAPTKL (SEQ ID NO: 6479):EPIS (SEQ ID NO: 6353), GSAGPXXTPTKM (SEQ ID NO: 6497):EPIS (SEQ ID NO: 6353), AAPASXXVPARL (SEQ ID NO: 6458):EPIS (SEQ ID NO: 6353), HVPKPXXAPTKL (SEQ ID NO: 6503):EPIS (SEQ ID NO: 6353), RVPSTXXAPVKT (SEQ ID NO: 6550):EPIS (SEQ ID NO: 6353), ASAAPXXVPQAL (SEQ ID NO: 6468):EPIS (SEQ ID NO: 6353), ASASPXXVSQDL (SEQ ID NO: 6478):EPIS (SEQ ID NO: 6353), ASASPXXVPQDL (SEQ ID NO: 6476):EPIS (SEQ ID NO: 6353), SSVKXQPSRVHH (SEQ ID NO: 6565):EPIS (SEQ ID NO: 6353), RNVQXRPTQVQL (SEQ ID NO: 6548):EPIS (SEQ ID NO: 6353), KIPKAXXTPTEL (SEQ ID NO: 6531):SPIN (SEQ ID NO: 6363), GIPEPXXTPTKM (SEQ ID NO: 6489):SPIN (SEQ ID NO: 6363), SIPKAXXTPTEL (SEQ ID NO: 6559):SPIN (SEQ ID NO: 6363), HVTKPTXTPTKL (SEQ ID NO: 6514):SPIN (SEQ ID NO: 6363), YVPKPXXTPTKL (SEQ ID NO: 6585):SPIN (SEQ ID NO: 6363), TVPKPXXTPTQL (SEQ ID NO: 6577):SPIN (SEQ ID NO: 6363), AVPKAXXTPTKL (SEQ ID NO: 6481):SPIN (SEQ ID NO: 6363), KVGKAXXTPTKL (SEQ ID NO: 6539):SPIN (SEQ ID NO: 6363), KASKAXXTPTKL (SEQ ID NO: 6523):SPIN (SEQ ID NO: 6363), AAPASXXTPTRL (SEQ ID NO: 6457):SPIN (SEQ ID NO: 6363), STPPTXXTPTRL (SEQ ID NO: 6569):SPIN (SEQ ID NO: 6363), HVPKPXXTPTKL (SEQ ID NO: 6505):SPIN (SEQ ID NO: 6363), RVPSTXXTPTKT (SEQ ID NO: 6551):SPIN (SEQ ID NO: 6363), ASAAPXXTPTAL (SEQ ID NO: 6465):SPIN (SEQ ID NO: 6363), ASASPXXTPTDL (SEQ ID NO: 6473):SPIN (SEQ ID NO: 6363), KIPKAXXVPTEL (SEQ ID NO: 6535):SPIN (SEQ ID NO: 6363), GIPEPXXVPEKM (SEQ ID NO: 6491):SPIN (SEQ ID NO: 6363), SIPKAXXVPTEL (SEQ ID NO: 6563):SPIN (SEQ ID NO: 6363), HVTKPTXAPTKL (SEQ ID NO: 6511):SPIN (SEQ ID NO: 6363), YVPKPXXAPTKL (SEQ ID NO: 6583):SPIN (SEQ ID NO: 6363), TVPKPXXAPTQL (SEQ ID NO: 6575):SPIN (SEQ ID NO: 6363), AVPKAXXAPTKL (SEQ ID NO: 6479):SPIN (SEQ ID NO: 6363), KVGKAXXVPTKL (SEQ ID NO: 6543):SPIN (SEQ ID NO: 6363), KASKAXXVPTKL (SEQ ID NO: 6527):SPIN (SEQ ID NO: 6363), AAPASXXVPARL (SEQ ID NO: 6458):SPIN (SEQ ID NO: 6363), STPPTXXVPTRL (SEQ ID NO: 6573):SPIN (SEQ ID NO: 6363), HVPKPXXAPTKL (SEQ ID NO: 6503):SPIN (SEQ ID NO: 6363), RVPSTXXAPVKT (SEQ ID NO: 6550):SPIN (SEQ ID NO: 6363), ASAAPXXVPQAL (SEQ ID NO: 6468):SPIN (SEQ ID NO: 6363), ASASPXXVSQDL (SEQ ID NO: 6478):SPIN (SEQ ID NO: 6363), ASASPXXVPQDL (SEQ ID NO: 6476):SPIN (SEQ ID NO: 6363), NDEGLEXVPTEE (SEQ ID NO: 6545):SPIN (SEQ ID NO: 6363), NDEGLEXVPTGQ (SEQ ID NO: 6546):SPIN (SEQ ID NO: 6363), SSVKXQPSRVHH (SEQ ID NO: 6565):SPIN (SEQ ID NO: 6363), RNVQXRPTQVQL (SEQ ID NO: 6548):SPIN (SEQ ID NO: 6363), KIPKAXXVPAEL (SEQ ID NO: 6532):SPIS (SEQ ID NO: 6364), GIPEPXXVPAKM (SEQ ID NO: 6490):SPIS (SEQ ID NO: 6364), SIPKAXXVPAEL (SEQ ID NO: 6560):SPIS (SEQ ID NO: 6364), HVTKPTXVPAKL (SEQ ID NO: 6516):SPIS (SEQ ID NO: 6364), YVPKPXXVPAKL (SEQ ID NO: 6586):SPIS (SEQ ID NO: 6364), TVPKPXXVPAQL (SEQ ID NO: 6578):SPIS (SEQ ID NO: 6364), AVPKAXXVPAKL (SEQ ID NO: 6482):SPIS (SEQ ID NO: 6364), KVGKAXXVPAKL (SEQ ID NO: 6540):SPIS (SEQ ID NO: 6364), KASKAXXVPAKL (SEQ ID NO: 6524):SPIS (SEQ ID NO: 6364), GSAGPXXVPAKM (SEQ ID NO: 6498):SPIS (SEQ ID NO: 6364), STPPTXXVPARL (SEQ ID NO: 6570):SPIS (SEQ ID NO: 6364), HVPKPXXVPAKL (SEQ ID NO: 6506):SPIS (SEQ ID NO: 6364), RVPSTXXVPAKT (SEQ ID NO: 6552):SPIS (SEQ ID NO: 6364), ASAAPXXVPAAL (SEQ ID NO: 6466):SPIS (SEQ ID NO: 6364), ASASPXXVPADL (SEQ ID NO: 6474):SPIS (SEQ ID NO: 6364), KVGKAXXVPTKL (SEQ ID NO: 6543):SPIS (SEQ ID NO: 6364), NDEGLEXVPTEE (SEQ ID NO: 6545):SPIS (SEQ ID NO: 6364), NDEGLEXVPTGQ (SEQ ID NO: 6546):SPIS (SEQ ID NO: 6364), KIPKAXXAPVEL (SEQ ID NO: 6530):KPLS (SEQ ID NO: 6356), GIPEPXXAPVKM (SEQ ID NO: 6488):KPLS (SEQ ID NO: 6356), SIPKAXXAPVEL (SEQ ID NO: 6558):KPLS (SEQ ID NO: 6356), HVTKPTXAPVKL (SEQ ID NO: 6512):KPLS (SEQ ID NO: 6356), YVPKPXXAPVKL (SEQ ID NO: 6584):KPLS (SEQ ID NO: 6356), TVPKPXXAPVQL (SEQ ID NO: 6576):KPLS (SEQ ID NO: 6356), AVPKAXXAPVKL (SEQ ID NO: 6480):KPLS (SEQ ID NO: 6356), KVGKAXXAPVKL (SEQ ID NO: 6538):KPLS (SEQ ID NO: 6356), KASKAXXAPVKL (SEQ ID NO: 6522):KPLS (SEQ ID NO: 6356), GSAGPXXAPVKM (SEQ ID NO: 6496):KPLS (SEQ ID NO: 6356), AAPASXXAPVRL (SEQ ID NO: 6456):KPLS (SEQ ID NO: 6356), STPPTXXAPVRL (SEQ ID NO: 6568):KPLS (SEQ ID NO: 6356), HVPKPXXAPVKL (SEQ ID NO: 6504):KPLS (SEQ ID NO: 6356), ASAAPXXAPVAL (SEQ ID NO: 6464):KPLS (SEQ ID NO: 6356), ASASPXXAPVDL (SEQ ID NO: 6472):KPLS (SEQ ID NO: 6356), KIPKAXXVPTEL (SEQ ID NO: 6535):KPLS (SEQ ID NO: 6356), GIPEPXXVPEKM (SEQ ID NO: 6491):KPLS (SEQ ID NO: 6356), SIPKAXXVPTEL (SEQ ID NO: 6563):KPLS (SEQ ID NO: 6356), HVTKPTXAPTKL (SEQ ID NO: 6511):KPLS (SEQ ID NO: 6356), YVPKPXXAPTKL (SEQ ID NO: 6583):KPLS (SEQ ID NO: 6356), TVPKPXXAPTQL (SEQ ID NO: 6575):KPLS (SEQ ID NO: 6356), AVPKAXXAPTKL (SEQ ID NO: 6479):KPLS (SEQ ID NO: 6356), KVGKAXXVPTKL (SEQ ID NO: 6543):KPLS (SEQ ID NO: 6356), KASKAXXVPTKL (SEQ ID NO: 6527):KPLS (SEQ ID NO: 6356), GSAGPXXTPTKM (SEQ ID NO: 6497):KPLS (SEQ ID NO: 6356), AAPASXXVPARL (SEQ ID NO: 6458):KPLS (SEQ ID NO: 6356), STPPTXXVPTRL (SEQ ID NO: 6573):KPLS (SEQ ID NO: 6356), HVPKPXXAPTKL (SEQ ID NO: 6503):KPLS (SEQ ID NO: 6356), ASAAPXXVPQAL (SEQ ID NO: 6468):KPLS (SEQ ID NO: 6356), ASASPXXVSQDL (SEQ ID NO: 6478):KPLS (SEQ ID NO: 6356), ASASPXXVPQDL (SEQ ID NO: 6476):KPLS (SEQ ID NO: 6356), NDEGLEXVPTEE (SEQ ID NO: 6545):KPLS (SEQ ID NO: 6356), NDEGLEXVPTGQ (SEQ ID NO: 6546):KPLS (SEQ ID NO: 6356), SSVKXQPSRVHH (SEQ ID NO: 6565):KPLS (SEQ ID NO: 6356), RNVQXRPTQVQL (SEQ ID NO: 6548):KPLS (SEQ ID NO: 6356), KIPKAXXVPQEL (SEQ ID NO: 6534):EPLP (SEQ ID NO: 6354), GIPEPXXVPQKM (SEQ ID NO: 6492):EPLP (SEQ ID NO: 6354), SIPKAXXVPQEL (SEQ ID NO: 6562):EPLP (SEQ ID NO: 6354), HVTKPTXVPQKL (SEQ ID NO: 6518):EPLP (SEQ ID NO: 6354), YVPKPXXVPQKL (SEQ ID NO: 6588):EPLP (SEQ ID NO: 6354), TVPKPXXVPQQL (SEQ ID NO: 6580):EPLP (SEQ ID NO: 6354), AVPKAXXVPQKL (SEQ ID NO: 6484):EPLP (SEQ ID NO: 6354), KVGKAXXVPQKL (SEQ ID NO: 6542):EPLP (SEQ ID NO: 6354), KASKAXXVPQKL (SEQ ID NO: 6526):EPLP (SEQ ID NO: 6354), GSAGPXXVPQKM (SEQ ID NO: 6500):EPLP (SEQ ID NO: 6354), AAPASXXVPQRL (SEQ ID NO: 6460):EPLP (SEQ ID NO: 6354), STPPTXXVPQRL (SEQ ID NO: 6572):EPLP (SEQ ID NO: 6354), HVPKPXXVPQKL (SEQ ID NO: 6508):EPLP (SEQ ID NO: 6354), RVPSTXXVPQKT (SEQ ID NO: 6554):EPLP (SEQ ID NO: 6354), ASASPXXVPQDL (SEQ ID NO: 6476):EPLP (SEQ ID NO: 6354), KIPKAXXVPTEL (SEQ ID NO: 6535):EPLP (SEQ ID NO: 6354), GIPEPXXVPEKM (SEQ ID NO: 6491):EPLP (SEQ ID NO: 6354), SIPKAXXVPTEL (SEQ ID NO: 6563):EPLP (SEQ ID NO: 6354), HVTKPTXAPTKL (SEQ ID NO: 6511):EPLP (SEQ ID NO: 6354), YVPKPXXAPTKL (SEQ ID NO: 6583):EPLP (SEQ ID NO: 6354), TVPKPXXAPTQL (SEQ ID NO: 6575):EPLP (SEQ ID NO: 6354), AVPKAXXAPTKL (SEQ ID NO: 6479):EPLP (SEQ ID NO: 6354), KVGKAXXVPTKL (SEQ ID NO: 6543):EPLP (SEQ ID NO: 6354), KASKAXXVPTKL (SEQ ID NO: 6527):EPLP (SEQ ID NO: 6354), GSAGPXXTPTKM (SEQ ID NO: 6497):EPLP (SEQ ID NO: 6354), AAPASXXVPARL (SEQ ID NO: 6458):EPLP (SEQ ID NO: 6354), STPPTXXVPTRL (SEQ ID NO: 6573):EPLP (SEQ ID NO: 6354), HVPKPXXAPTKL (SEQ ID NO: 6503):EPLP (SEQ ID NO: 6354), RVPSTXXAPVKT (SEQ ID NO: 6550):EPLP (SEQ ID NO: 6354), ASASPXXVSQDL (SEQ ID NO: 6478):EPLP (SEQ ID NO: 6354), NDEGLEXVPTEE (SEQ ID NO: 6545):EPLP (SEQ ID NO: 6354), NDEGLEXVPTGQ (SEQ ID NO: 6546):EPLP (SEQ ID NO: 6354), SSVKXQPSRVHH (SEQ ID NO: 6565):EPLP (SEQ ID NO: 6354), RNVQXRPTQVQL (SEQ ID NO: 6548):EPLP (SEQ ID NO: 6354), KIPKAXXVSQEL (SEQ ID NO: 6536):EPLT (SEQ ID NO: 6355), GIPEPXXVSQKM (SEQ ID NO: 6494):EPLT (SEQ ID NO: 6355), SIPKAXXVSQEL (SEQ ID NO: 6564):EPLT (SEQ ID NO: 6355), HVTKPTXVSQKL (SEQ ID NO: 6520):EPLT (SEQ ID NO: 6355), YVPKPXXVSQKL (SEQ ID NO: 6590):EPLT (SEQ ID NO: 6355), TVPKPXXVSQQL (SEQ ID NO: 6582):EPLT (SEQ ID NO: 6355), AVPKAXXVSQKL (SEQ ID NO: 6486):EPLT (SEQ ID NO: 6355), KVGKAXXVSQKL (SEQ ID NO: 6544):EPLT (SEQ ID NO: 6355), KASKAXXVSQKL (SEQ ID NO: 6528):EPLT (SEQ ID NO: 6355), GSAGPXXVSQKM (SEQ ID NO: 6502):EPLT (SEQ ID NO: 6355), AAPASXXVSQRL (SEQ ID NO: 6462):EPLT (SEQ ID NO: 6355), STPPTXXVSQRL (SEQ ID NO: 6574):EPLT (SEQ ID NO: 6355), HVPKPXXVSQKL (SEQ ID NO: 6510):EPLT (SEQ ID NO: 6355), RVPSTXXVSQKT (SEQ ID NO: 6556):EPLT (SEQ ID NO: 6355), ASAAPXXVSQAL (SEQ ID NO: 6470):EPLT (SEQ ID NO: 6355), ASASPXXVSQDL (SEQ ID NO: 6478):EPLT (SEQ ID NO: 6355), KIPKAXXVPTEL (SEQ ID NO: 6535):EPLT (SEQ ID NO: 6355), GIPEPXXVPEKM (SEQ ID NO: 6491):EPLT (SEQ ID NO: 6355), SIPKAXXVPTEL (SEQ ID NO: 6563):EPLT (SEQ ID NO: 6355), HVTKPTXAPTKL (SEQ ID NO: 6511):EPLT (SEQ ID NO: 6355), YVPKPXXAPTKL (SEQ ID NO: 6583):EPLT (SEQ ID NO: 6355), TVPKPXXAPTQL (SEQ ID NO: 6575):EPLT (SEQ ID NO: 6355), AVPKAXXAPTKL (SEQ ID NO: 6479):EPLT (SEQ ID NO: 6355), KVGKAXXVPTKL (SEQ ID NO: 6543):EPLT (SEQ ID NO: 6355), KASKAXXVPTKL (SEQ ID NO: 6527):EPLT (SEQ ID NO: 6355), GSAGPXXTPTKM (SEQ ID NO: 6497):EPLT (SEQ ID NO: 6355), AAPASXXVPARL (SEQ ID NO: 6458):EPLT (SEQ ID NO: 6355), STPPTXXVPTRL (SEQ ID NO: 6573):EPLT (SEQ ID NO: 6355), HVPKPXXAPTKL (SEQ ID NO: 6503):EPLT (SEQ ID NO: 6355), RVPSTXXAPVKT (SEQ ID NO: 6550):EPLT (SEQ ID NO: 6355), ASAAPXXVPQAL (SEQ ID NO: 6468):EPLT (SEQ ID NO: 6355), NDEGLEXVPTEE (SEQ ID NO: 6545):EPLT (SEQ ID NO: 6355), NDEGLEXVPTGQ (SEQ ID NO: 6546):EPLT (SEQ ID NO: 6355), SSVKXQPSRVHH (SEQ ID NO: 6565):EPLT (SEQ ID NO: 6355), RNVQXRPTQVQL (SEQ ID NO: 6548):EPLT (SEQ ID NO: 6355), KIPKAXXVPQEL (SEQ ID NO: 6534):EPLT (SEQ ID NO: 6355), GIPEPXXVPQKM (SEQ ID NO: 6492):EPLT (SEQ ID NO: 6355), SIPKAXXVPQEL (SEQ ID NO: 6562):EPLT (SEQ ID NO: 6355), HVTKPTXVPQKL (SEQ ID NO: 6518):EPLT (SEQ ID NO: 6355), YVPKPXXVPQKL (SEQ ID NO: 6588):EPLT (SEQ ID NO: 6355), TVPKPXXVPQQL (SEQ ID NO: 6580):EPLT (SEQ ID NO: 6355), AVPKAXXVPQKL (SEQ ID NO: 6484):EPLT (SEQ ID NO: 6355), KVGKAXXVPQKL (SEQ ID NO: 6542):EPLT (SEQ ID NO: 6355), KASKAXXVPQKL (SEQ ID NO: 6526):EPLT (SEQ ID NO: 6355), GSAGPXXVPQKM (SEQ ID NO: 6500):EPLT (SEQ ID NO: 6355), AAPASXXVPQRL (SEQ ID NO: 6460):EPLT (SEQ ID NO: 6355), STPPTXXVPQRL (SEQ ID NO: 6572):EPLT (SEQ ID NO: 6355), HVPKPXXVPQKL (SEQ ID NO: 6508):EPLT (SEQ ID NO: 6355), RVPSTXXVPQKT (SEQ ID NO: 6554):EPLT (SEQ ID NO: 6355), ASASPXXVPQDL (SEQ ID NO: 6476):EPLT (SEQ ID NO: 6355), NDEGLEXVPTGQ (SEQ ID NO: 6546):SNIT (SEQ ID NO: 6362), GIPEPXXVPEKM (SEQ ID NO: 6491):SNIT (SEQ ID NO: 6362), HVTKPTXAPTKL (SEQ ID NO: 6511):SNIT (SEQ ID NO: 6362), YVPKPXXAPTKL (SEQ ID NO: 6583):SNIT (SEQ ID NO: 6362), TVPKPXXAPTQL (SEQ ID NO: 6575):SNIT (SEQ ID NO: 6362), AVPKAXXAPTKL (SEQ ID NO: 6479):SNIT (SEQ ID NO: 6362), GSAGPXXTPTKM (SEQ ID NO: 6497):SNIT (SEQ ID NO: 6362), AAPASXXVPARL (SEQ ID NO: 6458):SNIT (SEQ ID NO: 6362), HVPKPXXAPTKL (SEQ ID NO: 6503):SNIT (SEQ ID NO: 6362), RVPSTXXAPVKT (SEQ ID NO: 6550):SNIT (SEQ ID NO: 6362), ASAAPXXVPQAL (SEQ ID NO: 6468):SNIT (SEQ ID NO: 6362), ASASPXXVSQDL (SEQ ID NO: 6478):SNIT (SEQ ID NO: 6362), ASASPXXVPQDL (SEQ ID NO: 6476):SNIT (SEQ ID NO: 6362), SSVKXQPSRVHH (SEQ ID NO: 6565):SNIT (SEQ ID NO: 6362), RNVQXRPTQVQL (SEQ ID NO: 6548):SNIT (SEQ ID NO: 6362), RNVQXRPSRVQL (SEQ ID NO: 6547):RSVK (SEQ ID NO: 6359), KIPKAXXVPTEL (SEQ ID NO: 6535):RSVK (SEQ ID NO: 6359), GIPEPXXVPEKM (SEQ ID NO: 6491):RSVK (SEQ ID NO: 6359), SIPKAXXVPTEL (SEQ ID NO: 6563):RSVK (SEQ ID NO: 6359), HVTKPTXAPTKL (SEQ ID NO: 6511):RSVK (SEQ ID NO: 6359), YVPKPXXAPTKL (SEQ ID NO: 6583):RSVK (SEQ ID NO: 6359), TVPKPXXAPTQL (SEQ ID NO: 6575):RSVK (SEQ ID NO: 6359), AVPKAXXAPTKL (SEQ ID NO: 6479):RSVK (SEQ ID NO: 6359), KVGKAXXVPTKL (SEQ ID NO: 6543):RSVK (SEQ ID NO: 6359), KASKAXXVPTKL (SEQ ID NO: 6527):RSVK (SEQ ID NO: 6359), GSAGPXXTPTKM (SEQ ID NO: 6497):RSVK (SEQ ID NO: 6359), AAPASXXVPARL (SEQ ID NO: 6458):RSVK (SEQ ID NO: 6359), STPPTXXVPTRL (SEQ ID NO: 6573):RSVK (SEQ ID NO: 6359), HVPKPXXAPTKL (SEQ ID NO: 6503):RSVK (SEQ ID NO: 6359), RVPSTXXAPVKT (SEQ ID NO: 6550):RSVK (SEQ ID NO: 6359), ASAAPXXVPQAL (SEQ ID NO: 6468):RSVK (SEQ ID NO: 6359), ASASPXXVSQDL (SEQ ID NO: 6478):RSVK (SEQ ID NO: 6359), ASASPXXVPQDL (SEQ ID NO: 6476):RSVK (SEQ ID NO: 6359), NDEGLEXVPTEE (SEQ ID NO: 6545):RSVK (SEQ ID NO: 6359), NDEGLEXVPTGQ (SEQ ID NO: 6546):RSVK (SEQ ID NO: 6359), RNVQXRPTQVQL (SEQ ID NO: 6548):RSVK (SEQ ID NO: 6359), SSVKXQPTQVHH (SEQ ID NO: 6566):RPVQ (SEQ ID NO: 6358), KIPKAXXVPTEL (SEQ ID NO: 6535):RPVQ (SEQ ID NO: 6358), GIPEPXXVPEKM (SEQ ID NO: 6491):RPVQ (SEQ ID NO: 6358), SIPKAXXVPTEL (SEQ ID NO: 6563):RPVQ (SEQ ID NO: 6358), HVTKPTXAPTKL (SEQ ID NO: 6511):RPVQ (SEQ ID NO: 6358), YVPKPXXAPTKL (SEQ ID NO: 6583):RPVQ (SEQ ID NO: 6358), TVPKPXXAPTQL (SEQ ID NO: 6575):RPVQ (SEQ ID NO: 6358), AVPKAXXAPTKL (SEQ ID NO: 6479):RPVQ (SEQ ID NO: 6358), KVGKAXXVPTKL (SEQ ID NO: 6543):RPVQ (SEQ ID NO: 6358), KASKAXXVPTKL (SEQ ID NO: 6527):RPVQ (SEQ ID NO: 6358), GSAGPXXTPTKM (SEQ ID NO: 6497):RPVQ (SEQ ID NO: 6358), AAPASXXVPARL (SEQ ID NO: 6458):RPVQ (SEQ ID NO: 6358), STPPTXXVPTRL (SEQ ID NO: 6573):RPVQ (SEQ ID NO: 6358), HVPKPXXAPTKL (SEQ ID NO: 6503):RPVQ (SEQ ID NO: 6358), RVPSTXXAPVKT (SEQ ID NO: 6550):RPVQ (SEQ ID NO: 6358), ASAAPXXVPQAL (SEQ ID NO: 6468):RPVQ (SEQ ID NO: 6358), ASASPXXVSQDL (SEQ ID NO: 6478):RPVQ (SEQ ID NO: 6358), ASASPXXVPQDL (SEQ ID NO: 6476):RPVQ (SEQ ID NO: 6358), NDEGLEXVPTEE (SEQ ID NO: 6545):RPVQ (SEQ ID NO: 6358), NDEGLEXVPTGQ (SEQ ID NO: 6546):RPVQ (SEQ ID NO: 6358) and SSVKXQPSRVHH (SEQ ID NO: 6565):RPVQ (SEQ ID NO: 6358).

[0308] In particular, in certain embodiments, the pair PEP3:PEP12 is selected from the group consisting of VPT:SAIS-AA17-LYL (SEQ ID NO: 6598), VPE:SAIS-AA17-LYL (SEQ ID NO: 6598), APT:SAIS-AA17-LYL (SEQ ID NO: 6598), TPT:SAIS-AA17-LYL (SEQ ID NO: 6598), VPA:SAIS-AA17-LYL (SEQ ID NO: 6598), APV:SAIS-AA17-LYL (SEQ ID NO: 6598), VPQ:SAIS-AA17-LYL (SEQ ID NO: 6598), VSQ:SAIS-AA17-LYL (SEQ ID NO: 6598), SRV:SAIS-AA17-LYL (SEQ ID NO: 6598), TQV:SAIS-AA17-LYL (SEQ ID NO: 6598), VPE:SSLS-AA17-LFF (SEQ ID NO: 6605), VPT:SSLS-AA17-LFF (SEQ ID NO: 6605), APT:SSLS-AA17-LFF (SEQ ID NO: 6605), TPT:SSLS-AA17-LFF (SEQ ID NO: 6605), VPA:SSLS-AA17-LFF (SEQ ID NO: 6605), APV:SSLS-AA17-LFF (SEQ ID NO: 6605), VPQ:SSLS-AA17-LFF (SEQ ID NO: 6605), VSQ:SSLS-AA17-LFF (SEQ ID NO: 6605), SRV:SSLS-AA17-LFF (SEQ ID NO: 6605), TQV:SSLS-AA17-LFF (SEQ ID NO: 6605), APT:NAIS-AA17-LYF (SEQ ID NO: 6595), VPT:NAIS-AA17-LYF (SEQ ID NO: 6595), VPE:NAIS-AA17-LYF (SEQ ID NO: 6595), TPT:NAIS-AA17-LYF (SEQ ID NO: 6595), VPA:NAIS-AA17-LYF (SEQ ID NO: 6595), APV:NAIS-AA17-LYF (SEQ ID NO: 6595), VPQ:NAIS-AA17-LYF (SEQ ID NO: 6595), VSQ:NAIS-AA17-LYF (SEQ ID NO: 6595), SRV:NAIS-AA17-LYF (SEQ ID NO: 6595), TQV:NAIS-AA17-LYF (SEQ ID NO: 6595), APT:SATS-AA17-LYY (SEQ ID NO: 6599), VPT:SATS-AA17-LYY (SEQ ID NO: 6599), VPE:SATS-AA17-LYY (SEQ ID NO: 6599), TPT:SATS-AA17-LYY (SEQ ID NO: 6599), VPA:SATS-AA17-LYY (SEQ ID NO: 6599), APV:SATS-AA17-LYY (SEQ ID NO: 6599), VPQ:SATS-AA17-LYY (SEQ ID NO: 6599), VSQ:SATS-AA17-LYY (SEQ ID NO: 6599), SRV:SATS-AA17-LYY (SEQ ID NO: 6599), TQV:SATS-AA17-LYY (SEQ ID NO: 6599), VPT:SPIS-AA17-LYK (SEQ ID NO: 6604), VPE:SPIS-AA17-LYK (SEQ ID NO: 6604), APT:SPIS-AA17-LYK (SEQ ID NO: 6604), TPT:SPIS-AA17-LYK (SEQ ID NO: 6604), VPA:SPIS-AA17-LYK (SEQ ID NO: 6604), APV:SPIS-AA17-LYK (SEQ ID NO: 6604), VPQ:SPIS-AA17-LYK (SEQ ID NO: 6604), VSQ:SPIS-AA17-LYK (SEQ ID NO: 6604), SRV:SPIS-AA17-LYK (SEQ ID NO: 6604), TQV:SPIS-AA17-LYK (SEQ ID NO: 6604), VPT:EPIS-AA17-LYL (SEQ ID NO: 6591), VPE:EPIS-AA17-LYL (SEQ ID NO: 6591), APT:EPIS-AA17-LYL (SEQ ID NO: 6591), TPT:EPIS-AA17-LYL (SEQ ID NO: 6591), VPA:EPIS-AA17-LYL (SEQ ID NO: 6591), APV:EPIS-AA17-LYL (SEQ ID NO: 6591), VPQ:EPIS-AA17-LYL (SEQ ID NO: 6591), VSQ:EPIS-AA17-LYL (SEQ ID NO: 6591), SRV:EPIS-AA17-LYL (SEQ ID NO: 6591), TQV:EPIS-AA17-LYL (SEQ ID NO: 6591), TPT:SPIN-AA17-LYF (SEQ ID NO: 6601), VPT:SPIN-AA17-LYF (SEQ ID NO: 6601), VPE:SPIN-AA17-LYF (SEQ ID NO: 6601), APT:SPIN-AA17-LYF (SEQ ID NO: 6601), VPA:SPIN-AA17-LYF (SEQ ID NO: 6601), APV:SPIN-AA17-LYF (SEQ ID NO: 6601), VPQ:SPIN-AA17-LYF (SEQ ID NO: 6601), VSQ:SPIN-AA17-LYF (SEQ ID NO: 6601), SRV:SPIN-AA17-LYF (SEQ ID NO: 6601), TQV:SPIN-AA17-LYF (SEQ ID NO: 6601), VPA:SPIS-AA17-LYI (SEQ ID NO: 6603), VPT:SPIS-AA17-LYI (SEQ ID NO: 6603), VPE:SPIS-AA17-LYI (SEQ ID NO: 6603), APT:SPIS-AA17-LYI (SEQ ID NO: 6603), TPT:SPIS-AA17-LYI (SEQ ID NO: 6603), APV:SPIS-AA17-LYI (SEQ ID NO: 6603), VPQ:SPIS-AA17-LYI (SEQ ID NO: 6603), VSQ:SPIS-AA17-LYI (SEQ ID NO: 6603), SRV:SPIS-AA17-LYI (SEQ ID NO: 6603), TQV:SPIS-AA17-LYI (SEQ ID NO: 6603), VPT:SPIS-AA17-LFI (SEQ ID NO: 6602), VPE:SPIS-AA17-LFI (SEQ ID NO: 6602), APT:SPIS-AA17-LFI (SEQ ID NO: 6602), TPT:SPIS-AA17-LFI (SEQ ID NO: 6602), VPA:SPIS-AA17-LFI (SEQ ID NO: 6602), APV:SPIS-AA17-LFI (SEQ ID NO: 6602), VPQ:SPIS-AA17-LFI (SEQ ID NO: 6602), VSQ:SPIS-AA17-LFI (SEQ ID NO: 6602), SRV:SPIS-AA17-LFI (SEQ ID NO: 6602), TQV:SPIS-AA17-LFI (SEQ ID NO: 6602), APV:KPLS-AA17-LYV (SEQ ID NO: 6594), VPT:KPLS-AA17-LYV (SEQ ID NO: 6594), VPE:KPLS-AA17-LYV (SEQ ID NO: 6594), APT:KPLS-AA17-LYV (SEQ ID NO: 6594), TPT:KPLS-AA17-LYV (SEQ ID NO: 6594), VPA:KPLS-AA17-LYV (SEQ ID NO: 6594), VPQ:KPLS-AA17-LYV (SEQ ID NO: 6594), VSQ:KPLS-AA17-LYV (SEQ ID NO: 6594), SRV:KPLS-AA17-LYV (SEQ ID NO: 6594), TQV:KPLS-AA17-LYV (SEQ ID NO: 6594), VPQ:EPLP-AA17-VYY (SEQ ID NO: 6592), VPT:EPLP-AA17-VYY (SEQ ID NO: 6592), VPE:EPLP-AA17-VYY (SEQ ID NO: 6592), APT:EPLP-AA17-VYY (SEQ ID NO: 6592), TPT:EPLP-AA17-VYY (SEQ ID NO: 6592), VPA:EPLP-AA17-VYY (SEQ ID NO: 6592), APV:EPLP-AA17-VYY (SEQ ID NO: 6592), VSQ:EPLP-AA17-VYY (SEQ ID NO: 6592), SRV:EPLP-AA17-VYY (SEQ ID NO: 6592), TQV:EPLP-AA17-VYY (SEQ ID NO: 6592), VSQ:EPLT-AA17-LYY (SEQ ID NO: 6593), VPT:EPLT-AA17-LYY (SEQ ID NO: 6593), VPE:EPLT-AA17-LYY (SEQ ID NO: 6593), APT:EPLT-AA17-LYY (SEQ ID NO: 6593), TPT:EPLT-AA17-LYY (SEQ ID NO: 6593), VPA:EPLT-AA17-LYY (SEQ ID NO: 6593), APV:EPLT-AA17-LYY (SEQ ID NO: 6593), VPQ:EPLT-AA17-LYY (SEQ ID NO: 6593), SRV:EPLT-AA17-LYY (SEQ ID NO: 6593), TQV:EPLT-AA17-LYY (SEQ ID NO: 6593), VPT:SNIT-AA17-QIM (SEQ ID NO: 6600), VPE:SNIT-AA17-QIM (SEQ ID NO: 6600), APT:SNIT-AA17-QIM (SEQ ID NO: 6600), TPT:SNIT-AA17-QIM (SEQ ID NO: 6600), VPA:SNIT-AA17-QIM (SEQ ID NO: 6600), APV:SNIT-AA17-QIM (SEQ ID NO: 6600), VPQ:SNIT-AA17-QIM (SEQ ID NO: 6600), VSQ:SNIT-AA17-QIM (SEQ ID NO: 6600), SRV:SNIT-AA17-QIM (SEQ ID NO: 6600), TQV:SNIT-AA17-QIM (SEQ ID NO: 6600), SRV:RSVK-AA17-AKV (SEQ ID NO: 6597), VPT:RSVK-AA17-AKV (SEQ ID NO: 6597), VPE:RSVK-AA17-AKV (SEQ ID NO: 6597), APT:RSVK-AA17-AKV (SEQ ID NO: 6597), TPT:RSVK-AA17-AKV (SEQ ID NO: 6597), VPA:RSVK-AA17-AKV (SEQ ID NO: 6597), APV:RSVK-AA17-AKV (SEQ ID NO: 6597), VPQ:RSVK-AA17-AKV (SEQ ID NO: 6597), VSQ:RSVK-AA17-AKV (SEQ ID NO: 6597), TQV:RSVK-AA17-AKV (SEQ ID NO: 6597), TQV:RPVQ-AA17-RKI (SEQ ID NO: 6596), VPT:RPVQ-AA17-RKI (SEQ ID NO: 6596), VPE:RPVQ-AA17-RKI (SEQ ID NO: 6596), APT:RPVQ-AA17-RKI (SEQ ID NO: 6596), TPT:RPVQ-AA17-RKI (SEQ ID NO: 6596), VPA:RPVQ-AA17-RKI (SEQ ID NO: 6596), APV:RPVQ-AA17-RKI (SEQ ID NO: 6596), VPQ:RPVQ-AA17-RKI (SEQ ID NO: 6596), VSQ:RPVQ-AA17-RKI (SEQ ID NO: 6596) and SRV:RPVQ-AA17-RKI (SEQ ID NO: 6596); and wherein AA¹⁷ is selected from the group consisting of G, A, V, L, I, P, F, M, W, T and S (in particular is selected from the group consisting of M, I, L, V and T).

[0309] In particular, in certain embodiments, the pair PEP12:PEP5 is selected from the group consisting of VPTKM (SEQ ID NO: 6424):SAIS-AA17-LYL (SEQ ID NO: 6598), VPTKL (SEQ ID NO: 6423):SAIS-AA17-LYL (SEQ ID NO: 6598), VPTQL (SEQ ID NO: 6426):SAIS-AA17-LYL (SEQ ID NO: 6598), VPTRL (SEQ ID NO: 6427):SAIS-AA17-LYL (SEQ ID NO: 6598), VPTKT (SEQ ID NO: 6425):SAIS-AA17-LYL (SEQ ID NO: 6598), VPTAL (SEQ ID NO: 6418):SAIS-AA17-LYL (SEQ ID NO: 6598), VPTDL (SEQ ID NO: 6419):SAIS-AA17-LYL (SEQ ID NO: 6598), VPEKM (SEQ ID NO: 6406):SAIS-AA17-LYL (SEQ ID NO: 6598), APTKL (SEQ ID NO: 6369):SAIS-AA17-LYL (SEQ ID NO: 6598), APTQL (SEQ ID NO: 6372):SAIS-AA17-LYL (SEQ ID NO: 6598), TPTKM (SEQ ID NO: 6388):SAIS-AA17-LYL (SEQ ID NO: 6598), VPARL (SEQ ID NO: 6401):SAIS-AA17-LYL (SEQ ID NO: 6598), APVKT (SEQ ID NO: 6379):SAIS-AA17-LYL (SEQ ID NO: 6598), VPQAL (SEQ ID NO: 6410):SAIS-AA17-LYL (SEQ ID NO: 6598), VSODL (SEQ ID NO: 6429):SAIS-AA17-LYL (SEQ ID NO: 6598), VPQDL (SEQ ID NO: 6411):SAIS-AA17-LYL (SEQ ID NO: 6598), SRVHH (SEQ ID NO: 6382):SAIS-AA17-LYL (SEQ ID NO: 6598), TQVQL (SEQ ID NO: 6393):SAIS-AA17-LYL (SEQ ID NO: 6598), VPEEL (SEQ ID NO: 6404):SSLS-AA17-LFF (SEQ ID NO: 6605), VPEKL (SEQ ID NO: 6405):SSLS-AA17-LFF (SEQ ID NO: 6605), VPEQL (SEQ ID NO: 6408):SSLS-AA17-LFF (SEQ ID NO: 6605), VPEKM (SEQ ID NO: 6406):SSLS-AA17-LFF (SEQ ID NO: 6605), VPERL (SEQ ID NO: 6409):SSLS-AA17-LFF (SEQ ID NO: 6605), VPEKT (SEQ ID NO: 6407):SSLS-AA17-LFF (SEQ ID NO: 6605), VPEAL (SEQ ID NO: 6402):SSLS-AA17-LFF (SEQ ID NO: 6605), VPEDL (SEQ ID NO: 6403):SSLS-AA17-LFF (SEQ ID NO: 6605), VPTEL (SEQ ID NO: 6421):SSLS-AA17-LFF (SEQ ID NO: 6605), APTKL (SEQ ID NO: 6369):SSLS-AA17-LFF (SEQ ID NO: 6605), APTOL (SEQ ID NO: 6372):SSLS-AA17-LFF (SEQ ID NO: 6605), VPTKL (SEQ ID NO: 6423):SSLS-AA17-LFF (SEQ ID NO: 6605), TPTKM (SEQ ID NO: 6388):SSLS-AA17-LFF (SEQ ID NO: 6605), VPARL (SEQ ID NO: 6401):SSLS-AA17-LFF (SEQ ID NO: 6605), VPTRL (SEQ ID NO: 6427):SSLS-AA17-LFF (SEQ ID NO: 6605), APVKT (SEQ ID NO: 6379):SSLS-AA17-LFF (SEQ ID NO: 6605), VPQAL (SEQ ID NO: 6410):SSLS-AA17-LFF (SEQ ID NO: 6605), VSODL (SEQ ID NO: 6429):SSLS-AA17-LFF (SEQ ID NO: 6605), VPQDL (SEQ ID NO: 6411):SSLS-AA17-LFF (SEQ ID NO: 6605), VPTEE (SEQ ID NO: 6420):SSLS-AA17-LFF (SEQ ID NO: 6605), VPTGQ (SEQ ID NO: 6422):SSLS-AA17-LFF (SEQ ID NO: 6605), SRVHH (SEQ ID NO: 6382):SSLS-AA17-LFF (SEQ ID NO: 6605), TQVQL (SEQ ID NO: 6393):SSLS-AA17-LFF (SEQ ID NO: 6605), APTEL (SEQ ID NO: 6368):NAIS-AA17-LYF (SEQ ID NO: 6595), APTKM (SEQ ID NO: 6370):NAIS-AA17-LYF (SEQ ID NO: 6595), APTKL (SEQ ID NO: 6369):NAIS-AA17-LYF (SEQ ID NO: 6595), APTRL (SEQ ID NO: 6373):NAIS-AA17-LYF (SEQ ID NO: 6595), APTKT (SEQ ID NO: 6371):NAIS-AA17-LYF (SEQ ID NO: 6595), APTAL (SEQ ID NO: 6366):NAIS-AA17-LYF (SEQ ID NO: 6595), APTDL (SEQ ID NO: 6367):NAIS-AA17-LYF (SEQ ID NO: 6595), VPTEL (SEQ ID NO: 6421):NAIS-AA17-LYF (SEQ ID NO: 6595), VPEKM (SEQ ID NO: 6406):NAIS-AA17-LYF (SEQ ID NO: 6595), VPTKL (SEQ ID NO: 6423):NAIS-AA17-LYF (SEQ ID NO: 6595), TPTKM (SEQ ID NO: 6388):NAIS-AA17-LYF (SEQ ID NO: 6595), VPARL (SEQ ID NO: 6401):NAIS-AA17-LYF (SEQ ID NO: 6595), VPTRL (SEQ ID NO: 6427):NAIS-AA17-LYF (SEQ ID NO: 6595), APVKT (SEQ ID NO: 6379):NAIS-AA17-LYF (SEQ ID NO: 6595), VPQAL (SEQ ID NO: 6410):NAIS-AA17-LYF (SEQ ID NO: 6595), VSODL (SEQ ID NO: 6429):NAIS-AA17-LYF (SEQ ID NO: 6595), VPQDL (SEQ ID NO: 6411):NAIS-AA17-LYF (SEQ ID NO: 6595), VPTEE (SEQ ID NO: 6420):NAIS-AA17-LYF (SEQ ID NO: 6595), VPTGQ (SEQ ID NO: 6422):NAIS-AA17-LYF (SEQ ID NO: 6595), SRVHH (SEQ ID NO: 6382):NAIS-AA17-LYF (SEQ ID NO: 6595), TQVQL (SEQ ID NO: 6393):NAIS-AA17-LYF (SEQ ID NO: 6595), APTEL (SEQ ID NO: 6368):SATS-AA17-LYY (SEQ ID NO: 6599), APTKM (SEQ ID NO: 6370):SATS-AA17-LYY (SEQ ID NO: 6599), APTKL (SEQ ID NO: 6369):SATS-AA17-LYY (SEQ ID NO: 6599), APTOL (SEQ ID NO: 6372):SATS-AA17-LYY (SEQ ID NO: 6599), APTRL (SEQ ID NO: 6373):SATS-AA17-LYY (SEQ ID NO: 6599), APTKT (SEQ ID NO: 6371):SATS-AA17-LYY (SEQ ID NO: 6599), APTAL (SEQ ID NO: 6366):SATS-AA17-LYY (SEQ ID NO: 6599), APTDL (SEQ ID NO: 6367):SATS-AA17-LYY (SEQ ID NO: 6599), VPTEL (SEQ ID NO: 6421):SATS-AA17-LYY (SEQ ID NO: 6599), VPEKM (SEQ ID NO: 6406):SATS-AA17-LYY (SEQ ID NO: 6599), VPTKL (SEQ ID NO: 6423):SATS-AA17-LYY (SEQ ID NO: 6599), TPTKM (SEQ ID NO: 6388):SATS-AA17-LYY (SEQ ID NO: 6599), VPARL (SEQ ID NO: 6401):SATS-AA17-LYY (SEQ ID NO: 6599), VPTRL (SEQ ID NO: 6427):SATS-AA17-LYY (SEQ ID NO: 6599), APVKT (SEQ ID NO: 6379):SATS-AA17-LYY (SEQ ID NO: 6599), VPQAL (SEQ ID NO: 6410):SATS-AA17-LYY (SEQ ID NO: 6599), VSODL (SEQ ID NO: 6429):SATS-AA17-LYY (SEQ ID NO: 6599), VPQDL (SEQ ID NO: 6411):SATS-AA17-LYY (SEQ ID NO: 6599), VPTEE (SEQ ID NO: 6420):SATS-AA17-LYY (SEQ ID NO: 6599), VPTGQ (SEQ ID NO: 6422):SATS-AA17-LYY (SEQ ID NO: 6599), SRVHH (SEQ ID NO: 6382):SATS-AA17-LYY (SEQ ID NO: 6599), TQVQL (SEQ ID NO: 6393):SATS-AA17-LYY (SEQ ID NO: 6599), VPTEL (SEQ ID NO: 6421):SPIS-AA17-LYK (SEQ ID NO: 6604), VPTKM (SEQ ID NO: 6424):SPIS-AA17-LYK (SEQ ID NO: 6604), VPTKL (SEQ ID NO: 6423):SPIS-AA17-LYK (SEQ ID NO: 6604), VPTQL (SEQ ID NO: 6426):SPIS-AA17-LYK (SEQ ID NO: 6604), VPTRL (SEQ ID NO: 6427):SPIS-AA17-LYK (SEQ ID NO: 6604), VPTKT (SEQ ID NO: 6425):SPIS-AA17-LYK (SEQ ID NO: 6604), VPTAL (SEQ ID NO: 6418):SPIS-AA17-LYK (SEQ ID NO: 6604), VPTDL (SEQ ID NO: 6419):SPIS-AA17-LYK (SEQ ID NO: 6604), VPEKM (SEQ ID NO: 6406):SPIS-AA17-LYK (SEQ ID NO: 6604), APTKL (SEQ ID NO: 6369):SPIS-AA17-LYK (SEQ ID NO: 6604), APTQL (SEQ ID NO: 6372):SPIS-AA17-LYK (SEQ ID NO: 6604), TPTKM (SEQ ID NO: 6388):SPIS-AA17-LYK (SEQ ID NO: 6604), VPARL (SEQ ID NO: 6401):SPIS-AA17-LYK (SEQ ID NO: 6604), APVKT (SEQ ID NO: 6379):SPIS-AA17-LYK (SEQ ID NO: 6604), VPQAL (SEQ ID NO: 6410):SPIS-AA17-LYK (SEQ ID NO: 6604), VSODL (SEQ ID NO: 6429):SPIS-AA17-LYK (SEQ ID NO: 6604), VPQDL (SEQ ID NO: 6411):SPIS-AA17-LYK (SEQ ID NO: 6604), SRVHH (SEQ ID NO: 6382):SPIS-AA17-LYK (SEQ ID NO: 6604), TQVQL (SEQ ID NO: 6393):SPIS-AA17-LYK (SEQ ID NO: 6604), VPTEL (SEQ ID NO: 6421):EPIS-AA17-LYL (SEQ ID NO: 6591), VPTKM (SEQ ID NO: 6424):EPIS-AA17-LYL (SEQ ID NO: 6591), VPTKL (SEQ ID NO: 6423):EPIS-AA17-LYL (SEQ ID NO: 6591), VPTQL (SEQ ID NO: 6426):EPIS-AA17-LYL (SEQ ID NO: 6591), VPTRL (SEQ ID NO: 6427):EPIS-AA17-LYL (SEQ ID NO: 6591), VPTKT (SEQ ID NO: 6425):EPIS-AA17-LYL (SEQ ID NO: 6591), VPTAL (SEQ ID NO: 6418):EPIS-AA17-LYL (SEQ ID NO: 6591), VPTDL (SEQ ID NO: 6419):EPIS-AA17-LYL (SEQ ID NO: 6591), VPEKM (SEQ ID NO: 6406):EPIS-AA17-LYL (SEQ ID NO: 6591), APTKL (SEQ ID NO: 6369):EPIS-AA17-LYL (SEQ ID NO: 6591), APTQL (SEQ ID NO: 6372):EPIS-AA17-LYL (SEQ ID NO: 6591), TPTKM (SEQ ID NO: 6388):EPIS-AA17-LYL (SEQ ID NO: 6591), VPARL (SEQ ID NO: 6401):EPIS-AA17-LYL (SEQ ID NO: 6591), APVKT (SEQ ID NO: 6379):EPIS-AA17-LYL (SEQ ID NO: 6591), VPQAL (SEQ ID NO: 6410):EPIS-AA17-LYL (SEQ ID NO: 6591), VSODL (SEQ ID NO: 6429):EPIS-AA17-LYL (SEQ ID NO: 6591), VPQDL (SEQ ID NO: 6411):EPIS-AA17-LYL (SEQ ID NO: 6591), SRVHH (SEQ ID NO: 6382):EPIS-AA17-LYL (SEQ ID NO: 6591), TQVQL (SEQ ID NO: 6393):EPIS-AA17-LYL (SEQ ID NO: 6591), TPTEL (SEQ ID NO: 6386):SPIN-AA17-LYF (SEQ ID NO: 6601), TPTKM (SEQ ID NO: 6388):SPIN-AA17-LYF (SEQ ID NO: 6601), TPTKL (SEQ ID NO: 6387):SPIN-AA17-LYF (SEQ ID NO: 6601), TPTQL (SEQ ID NO: 6390):SPIN-AA17-LYF (SEQ ID NO: 6601), TPTRL (SEQ ID NO: 6391):SPIN-AA17-LYF (SEQ ID NO: 6601), TPTKT (SEQ ID NO: 6389):SPIN-AA17-LYF (SEQ ID NO: 6601), TPTAL (SEQ ID NO: 6384):SPIN-AA17-LYF (SEQ ID NO: 6601), TPTDL (SEQ ID NO: 6385):SPIN-AA17-LYF (SEQ ID NO: 6601), VPTEL (SEQ ID NO: 6421):SPIN-AA17-LYF (SEQ ID NO: 6601), VPEKM (SEQ ID NO: 6406):SPIN-AA17-LYF (SEQ ID NO: 6601), APTKL (SEQ ID NO: 6369):SPIN-AA17-LYF (SEQ ID NO: 6601), APTOL (SEQ ID NO: 6372):SPIN-AA17-LYF (SEQ ID NO: 6601), VPTKL (SEQ ID NO: 6423):SPIN-AA17-LYF (SEQ ID NO: 6601), VPARL (SEQ ID NO: 6401):SPIN-AA17-LYF (SEQ ID NO: 6601), VPTRL (SEQ ID NO: 6427):SPIN-AA17-LYF (SEQ ID NO: 6601), APVKT (SEQ ID NO: 6379):SPIN-AA17-LYF (SEQ ID NO: 6601), VPQAL (SEQ ID NO: 6410):SPIN-AA17-LYF (SEQ ID NO: 6601), VSODL (SEQ ID NO: 6429):SPIN-AA17-LYF (SEQ ID NO: 6601), VPQDL (SEQ ID NO: 6411):SPIN-AA17-LYF (SEQ ID NO: 6601), VPTEE (SEQ ID NO: 6420):SPIN-AA17-LYF (SEQ ID NO: 6601), VPTGQ (SEQ ID NO: 6422):SPIN-AA17-LYF (SEQ ID NO: 6601), SRVHH (SEQ ID NO: 6382):SPIN-AA17-LYF (SEQ ID NO: 6601), TQVQL (SEQ ID NO: 6393):SPIN-AA17-LYF (SEQ ID NO: 6601), VPAEL (SEQ ID NO: 6396):SPIS-AA17-LYI (SEQ ID NO: 6603), VPAKM (SEQ ID NO: 6398):SPIS-AA17-LYI (SEQ ID NO: 6603), VPAKL (SEQ ID NO: 6397):SPIS-AA17-LYI (SEQ ID NO: 6603), VPAQL (SEQ ID NO: 6400):SPIS-AA17-LYI (SEQ ID NO: 6603), VPARL (SEQ ID NO: 6401):SPIS-AA17-LYI (SEQ ID NO: 6603), VPAKT (SEQ ID NO: 6399):SPIS-AA17-LYI (SEQ ID NO: 6603), VPAAL (SEQ ID NO: 6394):SPIS-AA17-LYI (SEQ ID NO: 6603), VPADL (SEQ ID NO: 6395):SPIS-AA17-LYI (SEQ ID NO: 6603), VPTEL (SEQ ID NO: 6421):SPIS-AA17-LYI (SEQ ID NO: 6603), VPEKM (SEQ ID NO: 6406):SPIS-AA17-LYI (SEQ ID NO: 6603), APTKL (SEQ ID NO: 6369):SPIS-AA17-LYI (SEQ ID NO: 6603), APTQL (SEQ ID NO: 6372):SPIS-AA17-LYI (SEQ ID NO: 6603), VPTKL (SEQ ID NO: 6423):SPIS-AA17-LYI (SEQ ID NO: 6603), TPTKM (SEQ ID NO: 6388):SPIS-AA17-LYI (SEQ ID NO: 6603), VPTRL (SEQ ID NO: 6427):SPIS-AA17-LYI (SEQ ID NO: 6603), APVKT (SEQ ID NO: 6379):SPIS-AA17-LYI (SEQ ID NO: 6603), VPQAL (SEQ ID NO: 6410):SPIS-AA17-LYI (SEQ ID NO: 6603), VSQDL (SEQ ID NO: 6429):SPIS-AA17-LYI (SEQ ID NO: 6603), VPQDL (SEQ ID NO: 6411):SPIS-AA17-LYI (SEQ ID NO: 6603), VPTEE (SEQ ID NO: 6420):SPIS-AA17-LYI (SEQ ID NO: 6603), VPTGQ (SEQ ID NO: 6422):SPIS-AA17-LYI (SEQ ID NO: 6603), SRVHH (SEQ ID NO: 6382):SPIS-AA17-LYI (SEQ ID NO: 6603), TQVQL (SEQ ID NO: 6393):SPIS-AA17-LYI (SEQ ID NO: 6603), VPTEL (SEQ ID NO: 6421):SPIS-AA17-LFI (SEQ ID NO: 6602), VPTKM (SEQ ID NO: 6424):SPIS-AA17-LFI (SEQ ID NO: 6602), VPTKL (SEQ ID NO: 6423):SPIS-AA17-LFI (SEQ ID NO: 6602), VPTQL (SEQ ID NO: 6426):SPIS-AA17-LFI (SEQ ID NO: 6602), VPTRL (SEQ ID NO: 6427):SPIS-AA17-LFI (SEQ ID NO: 6602), VPTKT (SEQ ID NO: 6425):SPIS-AA17-LFI (SEQ ID NO: 6602), VPTAL (SEQ ID NO: 6418):SPIS-AA17-LFI (SEQ ID NO: 6602), VPTDL (SEQ ID NO: 6419):SPIS-AA17-LFI (SEQ ID NO: 6602), VPEKM (SEQ ID NO: 6406):SPIS-AA17-LFI (SEQ ID NO: 6602), APTKL (SEQ ID NO: 6369):SPIS-AA17-LFI (SEQ ID NO: 6602), APTQL (SEQ ID NO: 6372):SPIS-AA17-LFI (SEQ ID NO: 6602), TPTKM (SEQ ID NO: 6388):SPIS-AA17-LFI (SEQ ID NO: 6602), VPARL (SEQ ID NO: 6401):SPIS-AA17-LFI (SEQ ID NO: 6602), APVKT (SEQ ID NO: 6379):SPIS-AA17-LFI (SEQ ID NO: 6602), VPQAL (SEQ ID NO: 6410):SPIS-AA17-LFI (SEQ ID NO: 6602), VSODL (SEQ ID NO: 6429):SPIS-AA17-LFI (SEQ ID NO: 6602), VPQDL (SEQ ID NO: 6411):SPIS-AA17-LFI (SEQ ID NO: 6602), SRVHH (SEQ ID NO: 6382):SPIS-AA17-LFI (SEQ ID NO: 6602), TQVQL (SEQ ID NO: 6393):SPIS-AA17-LFI (SEQ ID NO: 6602), APVEL (SEQ ID NO: 6376):KPLS-AA17-LYV (SEQ ID NO: 6594), APVKM (SEQ ID NO: 6378):KPLS-AA17-LYV (SEQ ID NO: 6594), APVKL (SEQ ID NO: 6377):KPLS-AA17-LYV (SEQ ID NO: 6594), APVQL (SEQ ID NO: 6380):KPLS-AA17-LYV (SEQ ID NO: 6594), APVRL (SEQ ID NO: 6381):KPLS-AA17-LYV (SEQ ID NO: 6594), APVAL (SEQ ID NO: 6374):KPLS-AA17-LYV (SEQ ID NO: 6594), APVDL (SEQ ID NO: 6375):KPLS-AA17-LYV (SEQ ID NO: 6594), VPTEL (SEQ ID NO: 6421):KPLS-AA17-LYV (SEQ ID NO: 6594), VPEKM (SEQ ID NO: 6406):KPLS-AA17-LYV (SEQ ID NO: 6594), APTKL (SEQ ID NO: 6369):KPLS-AA17-LYV (SEQ ID NO: 6594), APTOL (SEQ ID NO: 6372):KPLS-AA17-LYV (SEQ ID NO: 6594), VPTKL (SEQ ID NO: 6423):KPLS-AA17-LYV (SEQ ID NO: 6594), TPTKM (SEQ ID NO: 6388):KPLS-AA17-LYV (SEQ ID NO: 6594), VPARL (SEQ ID NO: 6401):KPLS-AA17-LYV (SEQ ID NO: 6594), VPTRL (SEQ ID NO: 6427):KPLS-AA17-LYV (SEQ ID NO: 6594), VPQAL (SEQ ID NO: 6410):KPLS-AA17-LYV (SEQ ID NO: 6594), VSODL (SEQ ID NO: 6429):KPLS-AA17-LYV (SEQ ID NO: 6594), VPQDL (SEQ ID NO: 6411):KPLS-AA17-LYV (SEQ ID NO: 6594), VPTEE (SEQ ID NO: 6420):KPLS-AA17-LYV (SEQ ID NO: 6594), VPTGQ (SEQ ID NO: 6422):KPLS-AA17-LYV (SEQ ID NO: 6594), SRVHH (SEQ ID NO: 6382):KPLS-AA17-LYV (SEQ ID NO: 6594), TQVQL (SEQ ID NO: 6393):KPLS-AA17-LYV (SEQ ID NO: 6594), VPQEL (SEQ ID NO: 6412):EPLP-AA17-VYY (SEQ ID NO: 6592), VPQKM (SEQ ID NO: 6414):EPLP-AA17-VYY (SEQ ID NO: 6592), VPQKL (SEQ ID NO: 6413):EPLP-AA17-VYY (SEQ ID NO: 6592), VPQQL (SEQ ID NO: 6416):EPLP-AA17-VYY (SEQ ID NO: 6592), VPQRL (SEQ ID NO: 6417):EPLP-AA17-VYY (SEQ ID NO: 6592), VPQKT (SEQ ID NO: 6415):EPLP-AA17-VYY (SEQ ID NO: 6592), VPQDL (SEQ ID NO: 6416):EPLP-AA17-VYY (SEQ ID NO: 6592), VPTEL (SEQ ID NO: 6421):EPLP-AA17-VYY (SEQ ID NO: 6592), VPEKM (SEQ ID NO: 6406):EPLP-AA17-VYY (SEQ ID NO: 6592), APTKL (SEQ ID NO: 6369):EPLP-AA17-VYY (SEQ ID NO: 6592), APTQL (SEQ ID NO: 6372):EPLP-AA17-VYY (SEQ ID NO: 6592), VPTKL (SEQ ID NO: 6423):EPLP-AA17-VYY (SEQ ID NO: 6592), TPTKM (SEQ ID NO: 6388):EPLP-AA17-VYY (SEQ ID NO: 6592), VPARL (SEQ ID NO: 6401):EPLP-AA17-VYY (SEQ ID NO: 6592), VPTRL (SEQ ID NO: 6427):EPLP-AA17-VYY (SEQ ID NO: 6592), APVKT (SEQ ID NO: 6379):EPLP-AA17-VYY (SEQ ID NO: 6592), VSODL (SEQ ID NO: 6429):EPLP-AA17-VYY (SEQ ID NO: 6592), VPTEE (SEQ ID NO: 6420):EPLP-AA17-VYY (SEQ ID NO: 6592), VPTGQ (SEQ ID NO: 6422):EPLP-AA17-VYY (SEQ ID NO: 6592), SRVHH (SEQ ID NO: 6382):EPLP-AA17-VYY (SEQ ID NO: 6592), TQVQL (SEQ ID NO: 6393):EPLP-AA17-VYY (SEQ ID NO: 6592), VSQEL (SEQ ID NO: 6430):EPLT-AA17-LYY (SEQ ID NO: 6593), VSQKM (SEQ ID NO: 6432):EPLT-AA17-LYY (SEQ ID NO: 6593), VSQKL (SEQ ID NO: 6431):EPLT-AA17-LYY (SEQ ID NO: 6593), VSQQL (SEQ ID NO: 6434):EPLT-AA17-LYY (SEQ ID NO: 6593), VSQRL (SEQ ID NO: 6435):EPLT-AA17-LYY (SEQ ID NO: 6593), VSQKT (SEQ ID NO: 6433):EPLT-AA17-LYY (SEQ ID NO: 6593), VSQAL (SEQ ID NO: 6428):EPLT-AA17-LYY (SEQ ID NO: 6593), VSODL (SEQ ID NO: 6429):EPLT-AA17-LYY (SEQ ID NO: 6593), VPTEL (SEQ ID NO: 6421):EPLT-AA17-LYY (SEQ ID NO: 6593), VPEKM (SEQ ID NO: 6406):EPLT-AA17-LYY (SEQ ID NO: 6593), APTKL (SEQ ID NO: 6369):EPLT-AA17-LYY (SEQ ID NO: 6593), APTQL (SEQ ID NO: 6372):EPLT-AA17-LYY (SEQ ID NO: 6593), VPTKL (SEQ ID NO: 6423):EPLT-AA17-LYY (SEQ ID NO: 6593), TPTKM (SEQ ID NO: 6388):EPLT-AA17-LYY (SEQ ID NO: 6593), VPARL (SEQ ID NO: 6401):EPLT-AA17-LYY (SEQ ID NO: 6593), VPTRL (SEQ ID NO: 6427):EPLT-AA17-LYY (SEQ ID NO: 6593), APVKT (SEQ ID NO: 6379):EPLT-AA17-LYY (SEQ ID NO: 6593), VPQAL (SEQ ID NO: 6410):EPLT-AA17-LYY (SEQ ID NO: 6593), VPTEE (SEQ ID NO: 6420):EPLT-AA17-LYY (SEQ ID NO: 6593), VPTGQ (SEQ ID NO: 6422):EPLT-AA17-LYY (SEQ ID NO: 6593), SRVHH (SEQ ID NO: 6382):EPLT-AA17-LYY (SEQ ID NO: 6593), TQVQL (SEQ ID NO: 6393):EPLT-AA17-LYY (SEQ ID NO: 6593), VPQEL (SEQ ID NO: 6412):EPLT-AA17-LYY (SEQ ID NO: 6593), VPQKM (SEQ ID NO: 6414):EPLT-AA17-LYY (SEQ ID NO: 6593), VPQKL (SEQ ID NO: 6413):EPLT-AA17-LYY (SEQ ID NO: 6593), VPQQL (SEQ ID NO: 6416):EPLT-AA17-LYY (SEQ ID NO: 6593), VPQRL (SEQ ID NO: 6417):EPLT-AA17-LYY (SEQ ID NO: 6593), VPQKT (SEQ ID NO: 6415):EPLT-AA17-LYY (SEQ ID NO: 6593), VPQDL (SEQ ID NO: 6411):EPLT-AA17-LYY (SEQ ID NO: 6593), VPTGQ (SEQ ID NO: 6422):SNIT-AA17-QIM (SEQ ID NO: 6600), VPEKM (SEQ ID NO: 6406):SNIT-AA17-QIM (SEQ ID NO: 6600), APTKL (SEQ ID NO: 6369):SNIT-AA17-QIM (SEQ ID NO: 6600), APTQL (SEQ ID NO: 6372):SNIT-AA17-QIM (SEQ ID NO: 6600), TPTKM (SEQ ID NO: 6388):SNIT-AA17-QIM (SEQ ID NO: 6600), VPARL (SEQ ID NO: 6401):SNIT-AA17-QIM (SEQ ID NO: 6600), APVKT (SEQ ID NO: 6379):SNIT-AA17-QIM (SEQ ID NO: 6600), VPQAL (SEQ ID NO: 6410):SNIT-AA17-QIM (SEQ ID NO: 6600), VSODL (SEQ ID NO: 6429):SNIT-AA17-QIM (SEQ ID NO: 6600), VPQDL (SEQ ID NO: 6411):SNIT-AA17-QIM (SEQ ID NO: 6600), SRVHH (SEQ ID NO: 6382):SNIT-AA17-QIM (SEQ ID NO: 6600), TQVQL (SEQ ID NO: 6393):SNIT-AA17-QIM (SEQ ID NO: 6600), SRVQL (SEQ ID NO: 6383):RSVK-AA17-AKV (SEQ ID NO: 6597), VPTEL (SEQ ID NO: 6421):RSVK-AA17-AKV (SEQ ID NO: 6597), VPEKM (SEQ ID NO: 6406):RSVK-AA17-AKV (SEQ ID NO: 6597), APTKL (SEQ ID NO: 6369):RSVK-AA17-AKV (SEQ ID NO: 6597), APTQL (SEQ ID NO: 6372):RSVK-AA17-AKV (SEQ ID NO: 6597), VPTKL (SEQ ID NO: 6423):RSVK-AA17-AKV (SEQ ID NO: 6597), TPTKM (SEQ ID NO: 6388):RSVK-AA17-AKV (SEQ ID NO: 6597), VPARL (SEQ ID NO: 6401):RSVK-AA17-AKV (SEQ ID NO: 6597), VPTRL (SEQ ID NO: 6427):RSVK-AA17-AKV (SEQ ID NO: 6597), APVKT (SEQ ID NO: 6379):RSVK-AA17-AKV (SEQ ID NO: 6597), VPQAL (SEQ ID NO: 6410):RSVK-AA17-AKV (SEQ ID NO: 6597), VSODL (SEQ ID NO: 6429):RSVK-AA17-AKV (SEQ ID NO: 6597), VPQDL (SEQ ID NO: 6411):RSVK-AA17-AKV (SEQ ID NO: 6597), VPTEE (SEQ ID NO: 6420):RSVK-AA17-AKV (SEQ ID NO: 6597), VPTGQ (SEQ ID NO: 6422):RSVK-AA17-AKV (SEQ ID NO: 6597), TQVQL (SEQ ID NO: 6393):RSVK-AA17-AKV (SEQ ID NO: 6597), TQVHH (SEQ ID NO: 6392):RPVQ-AA17-RKI (SEQ ID NO: 6596), VPTEL (SEQ ID NO: 6421):RPVQ-AA17-RKI (SEQ ID NO: 6596), VPEKM (SEQ ID NO: 6406):RPVQ-AA17-RKI (SEQ ID NO: 6596), APTKL (SEQ ID NO: 6369):RPVQ-AA17-RKI (SEQ ID NO: 6596), APTQL (SEQ ID NO: 6372):RPVQ-AA17-RKI (SEQ ID NO: 6596), VPTKL (SEQ ID NO: 6423):RPVQ-AA17-RKI (SEQ ID NO: 6596), TPTKM (SEQ ID NO: 6388):RPVQ-AA17-RKI (SEQ ID NO: 6596), VPARL (SEQ ID NO: 6401):RPVQ-AA17-RKI (SEQ ID NO: 6596), VPTRL (SEQ ID NO: 6427):RPVQ-AA17-RKI (SEQ ID NO: 6596), APVKT (SEQ ID NO: 6379):RPVQ-AA17-RKI (SEQ ID NO: 6596), VPQAL (SEQ ID NO: 6410):RPVQ-AA17-RKI (SEQ ID NO: 6596), VSODL (SEQ ID NO: 6429):RPVQ-AA17-RKI (SEQ ID NO: 6596), VPQDL (SEQ ID NO: 6411):RPVQ-AA17-RKI (SEQ ID NO: 6596), VPTEE (SEQ ID NO: 6420):RPVQ-AA17-RKI (SEQ ID NO: 6596), VPTGQ (SEQ ID NO: 6422):RPVQ-AA17-RKI (SEQ ID NO: 6596) and SRVHH (SEQ ID NO: 6382):RPVQ-AA17-RKI (SEQ ID NO: 6596); and wherein AA¹⁷ is selected from the group consisting of G, A, V, L, I, P, F, M, W, T and S (in particular is selected from the group consisting of M, I, L, V and T).

[0310] In particular, in certain embodiments, the pair PEP12:PEP7 is selected from the group consisting of GIPEPXX (SEQ ID NO: 6440):SAIS-AA17-LYL (SEQ ID NO: 6598), HVTKPTX (SEQ ID NO: 6443):SAIS-AA17-LYL (SEQ ID NO: 6598), YVPKPXX (SEQ ID NO: 6454):SAIS-AA17-LYL (SEQ ID NO: 6598), TVPKPXX (SEQ ID NO: 6453):SAIS-AA17-LYL (SEQ ID NO: 6598), AVPKAXX (SEQ ID NO: 6439):SAIS-AA17-LYL (SEQ ID NO: 6598), KVGKAXX (SEQ ID NO: 6446):SAIS-AA17-LYL (SEQ ID NO: 6598), KASKAXX (SEQ ID NO: 6444):SAIS-AA17-LYL (SEQ ID NO: 6598), GSAGPXX (SEQ ID NO: 6441):SAIS-AA17-LYL (SEQ ID NO: 6598), AAPASXX (SEQ ID NO: 6436):SAIS-AA17-LYL (SEQ ID NO: 6598), STPPTXX (SEQ ID NO: 6452):SAIS-AA17-LYL (SEQ ID NO: 6598), HVPKPXX (SEQ ID NO: 6442):SAIS-AA17-LYL (SEQ ID NO: 6598), RVPSTXX (SEQ ID NO: 6449):SAIS-AA17-LYL (SEQ ID NO: 6598), ASAAPXX (SEQ ID NO: 6437):SAIS-AA17-LYL (SEQ ID NO: 6598), ASASPXX (SEQ ID NO: 6438):SAIS-AA17-LYL (SEQ ID NO: 6598), SSVKXQP (SEQ ID NO: 6451):SAIS-AA17-LYL (SEQ ID NO: 6598), RNVQXRP (SEQ ID NO: 6448):SAIS-AA17-LYL (SEQ ID NO: 6598), KIPKAXX (SEQ ID NO: 6445):SSLS-AA17-LFF (SEQ ID NO: 6605), SIPKAXX (SEQ ID NO: 6450):SSLS-AA17-LFF (SEQ ID NO: 6605), HVTKPTX (SEQ ID NO: 6443):SSLS-AA17-LFF (SEQ ID NO: 6605), YVPKPXX (SEQ ID NO: 6454):SSLS-AA17-LFF (SEQ ID NO: 6605), TVPKPXX (SEQ ID NO: 6453):SSLS-AA17-LFF (SEQ ID NO: 6605), AVPKAXX (SEQ ID NO: 6439):SSLS-AA17-LFF (SEQ ID NO: 6605), KVGKAXX (SEQ ID NO: 6446):SSLS-AA17-LFF (SEQ ID NO: 6605), KASKAXX (SEQ ID NO: 6444):SSLS-AA17-LFF (SEQ ID NO: 6605), GSAGPXX (SEQ ID NO: 6441):SSLS-AA17-LFF (SEQ ID NO: 6605), AAPASXX (SEQ ID NO: 6436):SSLS-AA17-LFF (SEQ ID NO: 6605), STPPTXX (SEQ ID NO: 6452):SSLS-AA17-LFF (SEQ ID NO: 6605), HVPKPXX (SEQ ID NO: 6442):SSLS-AA17-LFF (SEQ ID NO: 6605), RVPSTXX (SEQ ID NO: 6449):SSLS-AA17-LFF (SEQ ID NO: 6605), ASAAPXX (SEQ ID NO: 6437):SSLS-AA17-LFF (SEQ ID NO: 6605), ASASPXX (SEQ ID NO: 6438):SSLS-AA17-LFF (SEQ ID NO: 6605), NDEGLEX (SEQ ID NO: 6447):SSLS-AA17-LFF (SEQ ID NO: 6605), SSVKXQP (SEQ ID NO: 6451):SSLS-AA17-LFF (SEQ ID NO: 6605), RNVQXRP (SEQ ID NO: 6448):SSLS-AA17-LFF (SEQ ID NO: 6605), KIPKAXX (SEQ ID NO: 6445):NAIS-AA17-LYF (SEQ ID NO: 6595), GIPEPXX (SEQ ID NO: 6440):NAIS-AA17-LYF (SEQ ID NO: 6595), SIPKAXX (SEQ ID NO: 6450):NAIS-AA17-LYF (SEQ ID NO: 6595), AVPKAXX (SEQ ID NO: 6439):NAIS-AA17-LYF (SEQ ID NO: 6595), KVGKAXX (SEQ ID NO: 6446):NAIS-AA17-LYF (SEQ ID NO: 6595), KASKAXX (SEQ ID NO: 6444):NAIS-AA17-LYF (SEQ ID NO: 6595), GSAGPXX (SEQ ID NO: 6441):NAIS-AA17-LYF (SEQ ID NO: 6595), AAPASXX (SEQ ID NO: 6436):NAIS-AA17-LYF (SEQ ID NO: 6595), STPPTXX (SEQ ID NO: 6452):NAIS-AA17-LYF (SEQ ID NO: 6595), RVPSTXX (SEQ ID NO: 6449):NAIS-AA17-LYF (SEQ ID NO: 6595), ASAAPXX (SEQ ID NO: 6437):NAIS-AA17-LYF (SEQ ID NO: 6595), ASASPXX (SEQ ID NO: 6438):NAIS-AA17-LYF (SEQ ID NO: 6595), NDEGLEX (SEQ ID NO: 6447):NAIS-AA17-LYF (SEQ ID NO: 6595), SSVKXQP (SEQ ID NO: 6451):NAIS-AA17-LYF (SEQ ID NO: 6595), RNVQXRP (SEQ ID NO: 6448):NAIS-AA17-LYF (SEQ ID NO: 6595), KIPKAXX (SEQ ID NO: 6445):SATS-AA17-LYY (SEQ ID NO: 6599), GIPEPXX (SEQ ID NO: 6440):SATS-AA17-LYY (SEQ ID NO: 6599), SIPKAXX (SEQ ID NO: 6450):SATS-AA17-LYY (SEQ ID NO: 6599), HVTKPTX (SEQ ID NO: 6443):SATS-AA17-LYY (SEQ ID NO: 6599), YVPKPXX (SEQ ID NO: 6454):SATS-AA17-LYY (SEQ ID NO: 6599), TVPKPXX (SEQ ID NO: 6453):SATS-AA17-LYY (SEQ ID NO: 6599), KVGKAXX (SEQ ID NO: 6446):SATS-AA17-LYY (SEQ ID NO: 6599), KASKAXX (SEQ ID NO: 6444):SATS-AA17-LYY (SEQ ID NO: 6599), GSAGPXX (SEQ ID NO: 6441):SATS-AA17-LYY (SEQ ID NO: 6599), AAPASXX (SEQ ID NO: 6436):SATS-AA17-LYY (SEQ ID NO: 6599), STPPTXX (SEQ ID NO: 6452):SATS-AA17-LYY (SEQ ID NO: 6599), HVPKPXX (SEQ ID NO: 6442):SATS-AA17-LYY (SEQ ID NO: 6599), RVPSTXX (SEQ ID NO: 6449):SATS-AA17-LYY (SEQ ID NO: 6599), ASAAPXX (SEQ ID NO: 6437):SATS-AA17-LYY (SEQ ID NO: 6599), ASASPXX (SEQ ID NO: 6438):SATS-AA17-LYY (SEQ ID NO: 6599), NDEGLEX (SEQ ID NO: 6447):SATS-AA17-LYY (SEQ ID NO: 6599), SSVKXQP (SEQ ID NO: 6451):SATS-AA17-LYY (SEQ ID NO: 6599), RNVQXRP (SEQ ID NO: 6448):SATS-AA17-LYY (SEQ ID NO: 6599), KIPKAXX (SEQ ID NO: 6445):SPIS-AA17-LYK (SEQ ID NO: 6604), GIPEPXX (SEQ ID NO: 6440):SPIS-AA17-LYK (SEQ ID NO: 6604), SIPKAXX (SEQ ID NO: 6450):SPIS-AA17-LYK (SEQ ID NO: 6604), HVTKPTX (SEQ ID NO: 6443):SPIS-AA17-LYK (SEQ ID NO: 6604), YVPKPXX (SEQ ID NO: 6454):SPIS-AA17-LYK (SEQ ID NO: 6604), TVPKPXX (SEQ ID NO: 6453):SPIS-AA17-LYK (SEQ ID NO: 6604), AVPKAXX (SEQ ID NO: 6439):SPIS-AA17-LYK (SEQ ID NO: 6604), KASKAXX (SEQ ID NO: 6444):SPIS-AA17-LYK (SEQ ID NO: 6604), GSAGPXX (SEQ ID NO: 6441):SPIS-AA17-LYK (SEQ ID NO: 6604), AAPASXX (SEQ ID NO: 6436):SPIS-AA17-LYK (SEQ ID NO: 6604), STPPTXX (SEQ ID NO: 6452):SPIS-AA17-LYK (SEQ ID NO: 6604), HVPKPXX (SEQ ID NO: 6442):SPIS-AA17-LYK (SEQ ID NO: 6604), RVPSTXX (SEQ ID NO: 6449):SPIS-AA17-LYK (SEQ ID NO: 6604), ASAAPXX (SEQ ID NO: 6437):SPIS-AA17-LYK (SEQ ID NO: 6604), ASASPXX (SEQ ID NO: 6438):SPIS-AA17-LYK (SEQ ID NO: 6604), SSVKXQP (SEQ ID NO: 6451):SPIS-AA17-LYK (SEQ ID NO: 6604), RNVQXRP (SEQ ID NO: 6448):SPIS-AA17-LYK (SEQ ID NO: 6604), KIPKAXX (SEQ ID NO: 6445):EPIS-AA17-LYL (SEQ ID NO: 6591), GIPEPXX (SEQ ID NO: 6440):EPIS-AA17-LYL (SEQ ID NO: 6591), SIPKAXX (SEQ ID NO: 6450):EPIS-AA17-LYL (SEQ ID NO: 6591), HVTKPTX (SEQ ID NO: 6443):EPIS-AA17-LYL (SEQ ID NO: 6591), YVPKPXX (SEQ ID NO: 6454):EPIS-AA17-LYL (SEQ ID NO: 6591), TVPKPXX (SEQ ID NO: 6453):EPIS-AA17-LYL (SEQ ID NO: 6591), AVPKAXX (SEQ ID NO: 6439):EPIS-AA17-LYL (SEQ ID NO: 6591), KVGKAXX (SEQ ID NO: 6446):EPIS-AA17-LYL (SEQ ID NO: 6591), GSAGPXX (SEQ ID NO: 6441):EPIS-AA17-LYL (SEQ ID NO: 6591), AAPASXX (SEQ ID NO: 6436):EPIS-AA17-LYL (SEQ ID NO: 6591), STPPTXX (SEQ ID NO: 6452):EPIS-AA17-LYL (SEQ ID NO: 6591), HVPKPXX (SEQ ID NO: 6442):EPIS-AA17-LYL (SEQ ID NO: 6591), RVPSTXX (SEQ ID NO: 6449):EPIS-AA17-LYL (SEQ ID NO: 6591), ASAAPXX (SEQ ID NO: 6437):EPIS-AA17-LYL (SEQ ID NO: 6591), ASASPXX (SEQ ID NO: 6438):EPIS-AA17-LYL (SEQ ID NO: 6591), SSVKXQP (SEQ ID NO: 6451):EPIS-AA17-LYL (SEQ ID NO: 6591), RNVQXRP (SEQ ID NO: 6448):EPIS-AA17-LYL (SEQ ID NO: 6591), KIPKAXX (SEQ ID NO: 6445):SPIN-AA17-LYF (SEQ ID NO: 6601), GIPEPXX (SEQ ID NO: 6440):SPIN-AA17-LYF (SEQ ID NO: 6601), SIPKAXX (SEQ ID NO: 6450):SPIN-AA17-LYF (SEQ ID NO: 6601), HVTKPTX (SEQ ID NO: 6443):SPIN-AA17-LYF (SEQ ID NO: 6601), YVPKPXX (SEQ ID NO: 6454):SPIN-AA17-LYF (SEQ ID NO: 6601), TVPKPXX (SEQ ID NO: 6453):SPIN-AA17-LYF (SEQ ID NO: 6601), AVPKAXX (SEQ ID NO: 6439):SPIN-AA17-LYF (SEQ ID NO: 6601), KVGKAXX (SEQ ID NO: 6446):SPIN-AA17-LYF (SEQ ID NO: 6601), KASKAXX (SEQ ID NO: 6444):SPIN-AA17-LYF (SEQ ID NO: 6601), AAPASXX (SEQ ID NO: 6436):SPIN-AA17-LYF (SEQ ID NO: 6601), STPPTXX (SEQ ID NO: 6452):SPIN-AA17-LYF (SEQ ID NO: 6601), HVPKPXX (SEQ ID NO: 6442):SPIN-AA17-LYF (SEQ ID NO: 6601), RVPSTXX (SEQ ID NO: 6449):SPIN-AA17-LYF (SEQ ID NO: 6601), ASAAPXX (SEQ ID NO: 6437):SPIN-AA17-LYF (SEQ ID NO: 6601), ASASPXX (SEQ ID NO: 6438):SPIN-AA17-LYF (SEQ ID NO: 6601), NDEGLEX (SEQ ID NO: 6447):SPIN-AA17-LYF (SEQ ID NO: 6601), SSVKXQP (SEQ ID NO: 6451):SPIN-AA17-LYF (SEQ ID NO: 6601), RNVQXRP (SEQ ID NO: 6448):SPIN-AA17-LYF (SEQ ID NO: 6601), KIPKAXX (SEQ ID NO: 6445):SPIS-AA17-LYI (SEQ ID NO: 6603), GIPEPXX (SEQ ID NO: 6440):SPIS-AA17-LYI (SEQ ID NO: 6603), SIPKAXX (SEQ ID NO: 6450):SPIS-AA17-LYI (SEQ ID NO: 6603), HVTKPTX (SEQ ID NO: 6443):SPIS-AA17-LYI (SEQ ID NO: 6603), YVPKPXX (SEQ ID NO: 6454):SPIS-AA17-LYI (SEQ ID NO: 6603), TVPKPXX (SEQ ID NO: 6453):SPIS-AA17-LYI (SEQ ID NO: 6603), AVPKAXX (SEQ ID NO: 6439):SPIS-AA17-LYI (SEQ ID NO: 6603), KVGKAXX (SEQ ID NO: 6446):SPIS-AA17-LYI (SEQ ID NO: 6603), KASKAXX (SEQ ID NO: 6444):SPIS-AA17-LYI (SEQ ID NO: 6603), GSAGPXX (SEQ ID NO: 6441):SPIS-AA17-LYI (SEQ ID NO: 6603), STPPTXX (SEQ ID NO: 6452):SPIS-AA17-LYI (SEQ ID NO: 6603), HVPKPXX (SEQ ID NO: 6442):SPIS-AA17-LYI (SEQ ID NO: 6603), RVPSTXX (SEQ ID NO: 6449):SPIS-AA17-LYI (SEQ ID NO: 6603), ASAAPXX (SEQ ID NO: 6437):SPIS-AA17-LYI (SEQ ID NO: 6603), ASASPXX (SEQ ID NO: 6438):SPIS-AA17-LYI (SEQ ID NO: 6603), NDEGLEX (SEQ ID NO: 6447):SPIS-AA17-LYI (SEQ ID NO: 6603), SSVKXQP (SEQ ID NO: 6451):SPIS-AA17-LYI (SEQ ID NO: 6603), RNVQXRP (SEQ ID NO: 6448):SPIS-AA17-LYI (SEQ ID NO: 6603), KIPKAXX (SEQ ID NO: 6445):SPIS-AA17-LFI (SEQ ID NO: 6602), GIPEPXX (SEQ ID NO: 6440):SPIS-AA17-LFI (SEQ ID NO: 6602), SIPKAXX (SEQ ID NO: 6450):SPIS-AA17-LFI (SEQ ID NO: 6602), HVTKPTX (SEQ ID NO: 6443):SPIS-AA17-LFI (SEQ ID NO: 6602), YVPKPXX (SEQ ID NO: 6454):SPIS-AA17-LFI (SEQ ID NO: 6602), TVPKPXX (SEQ ID NO: 6453):SPIS-AA17-LFI (SEQ ID NO: 6602), AVPKAXX (SEQ ID NO: 6439):SPIS-AA17-LFI (SEQ ID NO: 6602), KVGKAXX (SEQ ID NO: 6446):SPIS-AA17-LFI (SEQ ID NO: 6602), KASKAXX (SEQ ID NO: 6444):SPIS-AA17-LFI (SEQ ID NO: 6602), GSAGPXX (SEQ ID NO: 6441):SPIS-AA17-LFI (SEQ ID NO: 6602), AAPASXX (SEQ ID NO: 6436):SPIS-AA17-LFI (SEQ ID NO: 6602), HVPKPXX (SEQ ID NO: 6442):SPIS-AA17-LFI (SEQ ID NO: 6602), RVPSTXX (SEQ ID NO: 6449):SPIS-AA17-LFI (SEQ ID NO: 6602), ASAAPXX (SEQ ID NO: 6437):SPIS-AA17-LFI (SEQ ID NO: 6602), ASASPXX (SEQ ID NO: 6438):SPIS-AA17-LFI (SEQ ID NO: 6602), SSVKXQP (SEQ ID NO: 6451):SPIS-AA17-LFI (SEQ ID NO: 6602), RNVQXRP (SEQ ID NO: 6448):SPIS-AA17-LFI (SEQ ID NO: 6602), KIPKAXX (SEQ ID NO: 6445):KPLS-AA17-LYV (SEQ ID NO: 6594), GIPEPXX (SEQ ID NO: 6440):KPLS-AA17-LYV (SEQ ID NO: 6594), SIPKAXX (SEQ ID NO: 6450):KPLS-AA17-LYV (SEQ ID NO: 6594), HVTKPTX (SEQ ID NO: 6443):KPLS-AA17-LYV (SEQ ID NO: 6594), YVPKPXX (SEQ ID NO: 6454):KPLS-AA17-LYV (SEQ ID NO: 6594), TVPKPXX (SEQ ID NO: 6453):KPLS-AA17-LYV (SEQ ID NO: 6594), AVPKAXX (SEQ ID NO: 6439):KPLS-AA17-LYV (SEQ ID NO: 6594), KVGKAXX (SEQ ID NO: 6446):KPLS-AA17-LYV (SEQ ID NO: 6594), KASKAXX (SEQ ID NO: 6444):KPLS-AA17-LYV (SEQ ID NO: 6594), GSAGPXX (SEQ ID NO: 6441):KPLS-AA17-LYV (SEQ ID NO: 6594), AAPASXX (SEQ ID NO: 6436):KPLS-AA17-LYV (SEQ ID NO: 6594), STPPTXX (SEQ ID NO: 6452):KPLS-AA17-LYV (SEQ ID NO: 6594), HVPKPXX (SEQ ID NO: 6442):KPLS-AA17-LYV (SEQ ID NO: 6594), ASAAPXX (SEQ ID NO: 6437):KPLS-AA17-LYV (SEQ ID NO: 6594), ASASPXX (SEQ ID NO: 6438):KPLS-AA17-LYV (SEQ ID NO: 6594), NDEGLEX (SEQ ID NO: 6447):KPLS-AA17-LYV (SEQ ID NO: 6594), SSVKXQP (SEQ ID NO: 6451):KPLS-AA17-LYV (SEQ ID NO: 6594), RNVQXRP (SEQ ID NO: 6448):KPLS-AA17-LYV (SEQ ID NO: 6594), KIPKAXX (SEQ ID NO: 6445):EPLP-AA17-VYY (SEQ ID NO: 6592), GIPEPXX (SEQ ID NO: 6440):EPLP-AA17-VYY (SEQ ID NO: 6592), SIPKAXX (SEQ ID NO: 6450):EPLP-AA17-VYY (SEQ ID NO: 6592), HVTKPTX (SEQ ID NO: 6443):EPLP-AA17-VYY (SEQ ID NO: 6592), YVPKPXX (SEQ ID NO: 6454):EPLP-AA17-VYY (SEQ ID NO: 6592), TVPKPXX (SEQ ID NO: 6453):EPLP-AA17-VYY (SEQ ID NO: 6592), AVPKAXX (SEQ ID NO: 6439):EPLP-AA17-VYY (SEQ ID NO: 6592), KVGKAXX (SEQ ID NO: 6446):EPLP-AA17-VYY (SEQ ID NO: 6592), KASKAXX (SEQ ID NO: 6444):EPLP-AA17-VYY (SEQ ID NO: 6592), GSAGPXX (SEQ ID NO: 6441):EPLP-AA17-VYY (SEQ ID NO: 6592), AAPASXX (SEQ ID NO: 6436):EPLP-AA17-VYY (SEQ ID NO: 6592), STPPTXX (SEQ ID NO: 6452):EPLP-AA17-VYY (SEQ ID NO: 6592), HVPKPXX (SEQ ID NO: 6442):EPLP-AA17-VYY (SEQ ID NO: 6592), RVPSTXX (SEQ ID NO: 6449):EPLP-AA17-VYY (SEQ ID NO: 6592), ASASPXX (SEQ ID NO: 6438):EPLP-AA17-VYY (SEQ ID NO: 6592), NDEGLEX (SEQ ID NO: 6447):EPLP-AA17-VYY (SEQ ID NO: 6592), SSVKXQP (SEQ ID NO: 6451):EPLP-AA17-VYY (SEQ ID NO: 6592), RNVQXRP (SEQ ID NO: 6448):EPLP-AA17-VYY (SEQ ID NO: 6592), KIPKAXX (SEQ ID NO: 6445):EPLT-AA17-LYY (SEQ ID NO: 6593), GIPEPXX (SEQ ID NO: 6440):EPLT-AA17-LYY (SEQ ID NO: 6593), SIPKAXX (SEQ ID NO: 6450):EPLT-AA17-LYY (SEQ ID NO: 6593), HVTKPTX (SEQ ID NO: 6443):EPLT-AA17-LYY (SEQ ID NO: 6593), YVPKPXX (SEQ ID NO: 6454):EPLT-AA17-LYY (SEQ ID NO: 6593), TVPKPXX (SEQ ID NO: 6453):EPLT-AA17-LYY (SEQ ID NO: 6593), AVPKAXX (SEQ ID NO: 6439):EPLT-AA17-LYY (SEQ ID NO: 6593), KVGKAXX (SEQ ID NO: 6446):EPLT-AA17-LYY (SEQ ID NO: 6593), KASKAXX (SEQ ID NO: 6444):EPLT-AA17-LYY (SEQ ID NO: 6593), GSAGPXX (SEQ ID NO: 6441):EPLT-AA17-LYY (SEQ ID NO: 6593), AAPASXX (SEQ ID NO: 6436):EPLT-AA17-LYY (SEQ ID NO: 6593), STPPTXX (SEQ ID NO: 6452):EPLT-AA17-LYY (SEQ ID NO: 6593), HVPKPXX (SEQ ID NO: 6442):EPLT-AA17-LYY (SEQ ID NO: 6593), RVPSTXX (SEQ ID NO: 6449):EPLT-AA17-LYY (SEQ ID NO: 6593), ASAAPXX (SEQ ID NO: 6437):EPLT-AA17-LYY (SEQ ID NO: 6593), ASASPXX (SEQ ID NO: 6438):EPLT-AA17-LYY (SEQ ID NO: 6593), NDEGLEX (SEQ ID NO: 6447):EPLT-AA17-LYY (SEQ ID NO: 6593), SSVKXQP (SEQ ID NO: 6451):EPLT-AA17-LYY (SEQ ID NO: 6593), RNVQXRP (SEQ ID NO: 6448):EPLT-AA17-LYY (SEQ ID NO: 6593), NDEGLEX (SEQ ID NO: 6447):SNIT-AA17-QIM (SEQ ID NO: 6600), GIPEPXX (SEQ ID NO: 6440):SNIT-AA17-QIM (SEQ ID NO: 6600), HVTKPTX (SEQ ID NO: 6443):SNIT-AA17-QIM (SEQ ID NO: 6600), YVPKPXX (SEQ ID NO: 6454):SNIT-AA17-QIM (SEQ ID NO: 6600), TVPKPXX (SEQ ID NO: 6453):SNIT-AA17-QIM (SEQ ID NO: 6600), AVPKAXX (SEQ ID NO: 6439):SNIT-AA17-QIM (SEQ ID NO: 6600), GSAGPXX (SEQ ID NO: 6441):SNIT-AA17-QIM (SEQ ID NO: 6600), AAPASXX (SEQ ID NO: 6436):SNIT-AA17-QIM (SEQ ID NO: 6600), HVPKPXX (SEQ ID NO: 6442):SNIT-AA17-QIM (SEQ ID NO: 6600), RVPSTXX (SEQ ID NO: 6449):SNIT-AA17-QIM (SEQ ID NO: 6600), ASAAPXX (SEQ ID NO: 6437):SNIT-AA17-QIM (SEQ ID NO: 6600), ASASPXX (SEQ ID NO: 6438):SNIT-AA17-QIM (SEQ ID NO: 6600), SSVKXQP (SEQ ID NO: 6451):SNIT-AA17-QIM (SEQ ID NO: 6600), RNVQXRP (SEQ ID NO: 6448):SNIT-AA17-QIM (SEQ ID NO: 6600), RNVQXRP (SEQ ID NO: 6448):RSVK-AA17-AKV (SEQ ID NO: 6597), KIPKAXX (SEQ ID NO: 6445):RSVK-AA17-AKV (SEQ ID NO: 6597), GIPEPXX (SEQ ID NO: 6440):RSVK-AA17-AKV (SEQ ID NO: 6597), SIPKAXX (SEQ ID NO: 6450):RSVK-AA17-AKV (SEQ ID NO: 6597), HVTKPTX (SEQ ID NO: 6443):RSVK-AA17-AKV (SEQ ID NO: 6597), YVPKPXX (SEQ ID NO: 6454):RSVK-AA17-AKV (SEQ ID NO: 6597), TVPKPXX (SEQ ID NO: 6453):RSVK-AA17-AKV (SEQ ID NO: 6597), AVPKAXX (SEQ ID NO: 6439):RSVK-AA17-AKV (SEQ ID NO: 6597), KVGKAXX (SEQ ID NO: 6446):RSVK-AA17-AKV (SEQ ID NO: 6597), KASKAXX (SEQ ID NO: 6444):RSVK-AA17-AKV (SEQ ID NO: 6597), GSAGPXX (SEQ ID NO: 6441):RSVK-AA17-AKV (SEQ ID NO: 6597), AAPASXX (SEQ ID NO: 6436):RSVK-AA17-AKV (SEQ ID NO: 6597), STPPTXX (SEQ ID NO: 6452):RSVK-AA17-AKV (SEQ ID NO: 6597), HVPKPXX (SEQ ID NO: 6442):RSVK-AA17-AKV (SEQ ID NO: 6597), RVPSTXX (SEQ ID NO: 6449):RSVK-AA17-AKV (SEQ ID NO: 6597), ASAAPXX (SEQ ID NO: 6437):RSVK-AA17-AKV (SEQ ID NO: 6597), ASASPXX (SEQ ID NO: 6438):RSVK-AA17-AKV (SEQ ID NO: 6597), NDEGLEX (SEQ ID NO: 6447):RSVK-AA17-AKV (SEQ ID NO: 6597), SSVKXQP (SEQ ID NO: 6451):RPVQ-AA17-RKI (SEQ ID NO: 6596), KIPKAXX (SEQ ID NO: 6445):RPVQ-AA17-RKI (SEQ ID NO: 6596), GIPEPXX (SEQ ID NO: 6440):RPVQ-AA17-RKI (SEQ ID NO: 6596), SIPKAXX (SEQ ID NO: 6450):RPVQ-AA17-RKI (SEQ ID NO: 6596), HVTKPTX (SEQ ID NO: 6443):RPVQ-AA17-RKI (SEQ ID NO: 6596), YVPKPXX (SEQ ID NO: 6454):RPVQ-AA17-RKI (SEQ ID NO: 6596), TVPKPXX (SEQ ID NO: 6453):RPVQ-AA17-RKI (SEQ ID NO: 6596), AVPKAXX (SEQ ID NO: 6439):RPVQ-AA17-RKI (SEQ ID NO: 6596), KVGKAXX (SEQ ID NO: 6446):RPVQ-AA17-RKI (SEQ ID NO: 6596), KASKAXX (SEQ ID NO: 6444):RPVQ-AA17-RKI (SEQ ID NO: 6596), GSAGPXX (SEQ ID NO: 6441):RPVQ-AA17-RKI (SEQ ID NO: 6596), AAPASXX (SEQ ID NO: 6436):RPVQ-AA17-RKI (SEQ ID NO: 6596), STPPTXX (SEQ ID NO: 6452):RPVQ-AA17-RKI (SEQ ID NO: 6596), HVPKPXX (SEQ ID NO: 6442):RPVQ-AA17-RKI (SEQ ID NO: 6596), RVPSTXX (SEQ ID NO: 6449):RPVQ-AA17-RKI (SEQ ID NO: 6596), ASAAPXX (SEQ ID NO: 6437):RPVQ-AA17-RKI (SEQ ID NO: 6596), ASASPXX (SEQ ID NO: 6438):RPVQ-AA17-RKI (SEQ ID NO: 6596) and NDEGLEX (SEQ ID NO: 6447):RPVQ-AA17-RKI (SEQ ID NO: 6596); and wherein AA¹⁷ is selected from the group consisting of G, A, V, L, I, P, F, M, W, T and S (in particular is selected from the group consisting of M, I, L, V and T).

[0311] In particular, in certain embodiments, the pair PEP12:PEP9 is selected from the group consisting of GIPEPXXVPTKM (SEQ ID NO: 6493):SAIS-AA17-LYL (SEQ ID NO: 6598), HVTKPTXVPTKL (SEQ ID NO: 6519):SAIS-AA17-LYL (SEQ ID NO: 6598), YVPKPXXVPTKL (SEQ ID NO: 6589):SAIS-AA17-LYL (SEQ ID NO: 6598), TVPKPXXVPTQL (SEQ ID NO: 6581):SAIS-AA17-LYL (SEQ ID NO: 6598), AVPKAXXVPTKL (SEQ ID NO: 6485):SAIS-AA17-LYL (SEQ ID NO: 6598), KVGKAXXVPTKL (SEQ ID NO: 6543):SAIS-AA17-LYL (SEQ ID NO: 6598), KASKAXXVPTKL (SEQ ID NO: 6527):SAIS-AA17-LYL (SEQ ID NO: 6598), GSAGPXXVPTKM (SEQ ID NO: 6501):SAIS-AA17-LYL (SEQ ID NO: 6598), AAPASXXVPTRL (SEQ ID NO: 6461):SAIS-AA17-LYL (SEQ ID NO: 6598), STPPTXXVPTRL (SEQ ID NO: 6573):SAIS-AA17-LYL (SEQ ID NO: 6598), HVPKPXXVPTKL (SEQ ID NO: 6509):SAIS-AA17-LYL (SEQ ID NO: 6598), RVPSTXXVPTKT (SEQ ID NO: 6555):SAIS-AA17-LYL (SEQ ID NO: 6598), ASAAPXXVPTAL (SEQ ID NO: 6469):SAIS-AA17-LYL (SEQ ID NO: 6598), ASASPXXVPTDL (SEQ ID NO: 6477):SAIS-AA17-LYL (SEQ ID NO: 6598), GIPEPXXVPEKM (SEQ ID NO: 6491):SAIS-AA17-LYL (SEQ ID NO: 6598), HVTKPTXAPTKL (SEQ ID NO: 6511):SAIS-AA17-LYL (SEQ ID NO: 6598), YVPKPXXAPTKL (SEQ ID NO: 6583):SAIS-AA17-LYL (SEQ ID NO: 6598), TVPKPXXAPTQL (SEQ ID NO: 6575):SAIS-AA17-LYL (SEQ ID NO: 6598), AVPKAXXAPTKL (SEQ ID NO: 6479):SAIS-AA17-LYL (SEQ ID NO: 6598), GSAGPXXTPTKM (SEQ ID NO: 6497):SAIS-AA17-LYL (SEQ ID NO: 6598), AAPASXXVPARL (SEQ ID NO: 6458):SAIS-AA17-LYL (SEQ ID NO: 6598), HVPKPXXAPTKL (SEQ ID NO: 6503):SAIS-AA17-LYL (SEQ ID NO: 6598), RVPSTXXAPVKT (SEQ ID NO: 6550):SAIS-AA17-LYL (SEQ ID NO: 6598), ASAAPXXVPQAL (SEQ ID NO: 6468):SAIS-AA17-LYL (SEQ ID NO: 6598), ASASPXXVSQDL (SEQ ID NO: 6478):SAIS-AA17-LYL (SEQ ID NO: 6598), ASASPXXVPQDL (SEQ ID NO: 6476):SAIS-AA17-LYL (SEQ ID NO: 6598), SSVKXQPSRVHH (SEQ ID NO: 6565):SAIS-AA17-LYL (SEQ ID NO: 6598), RNVQXRPTQVQL (SEQ ID NO: 6548):SAIS-AA17-LYL (SEQ ID NO: 6598), KIPKAXXVPEEL (SEQ ID NO: 6533):SSLS-AA17-LFF (SEQ ID NO: 6605), SIPKAXXVPEEL (SEQ ID NO: 6561):SSLS-AA17-LFF (SEQ ID NO: 6605), HVTKPTXVPEKL (SEQ ID NO: 6517):SSLS-AA17-LFF (SEQ ID NO: 6605), YVPKPXXVPEKL (SEQ ID NO: 6587):SSLS-AA17-LFF (SEQ ID NO: 6605), TVPKPXXVPEQL (SEQ ID NO: 6579):SSLS-AA17-LFF (SEQ ID NO: 6605), AVPKAXXVPEKL (SEQ ID NO: 6483):SSLS-AA17-LFF (SEQ ID NO: 6605), KVGKAXXVPEKL (SEQ ID NO: 6541):SSLS-AA17-LFF (SEQ ID NO: 6605), KASKAXXVPEKL (SEQ ID NO: 6525):SSLS-AA17-LFF (SEQ ID NO: 6605), GSAGPXXVPEKM (SEQ ID NO: 6499):SSLS-AA17-LFF (SEQ ID NO: 6605), AAPASXXVPERL (SEQ ID NO: 6459):SSLS-AA17-LFF (SEQ ID NO: 6605), STPPTXXVPERL (SEQ ID NO: 6571):SSLS-AA17-LFF (SEQ ID NO: 6605), HVPKPXXVPEKL (SEQ ID NO: 6507):SSLS-AA17-LFF (SEQ ID NO: 6605), RVPSTXXVPEKT (SEQ ID NO: 6553):SSLS-AA17-LFF (SEQ ID NO: 6605), ASAAPXXVPEAL (SEQ ID NO: 6467):SSLS-AA17-LFF (SEQ ID NO: 6605), ASASPXXVPEDL (SEQ ID NO: 6475):SSLS-AA17-LFF (SEQ ID NO: 6605), KIPKAXXVPTEL (SEQ ID NO: 6535):SSLS-AA17-LFF (SEQ ID NO: 6605), SIPKAXXVPTEL (SEQ ID NO: 6563):SSLS-AA17-LFF (SEQ ID NO: 6605), HVTKPTXAPTKL (SEQ ID NO: 6511):SSLS-AA17-LFF (SEQ ID NO: 6605), YVPKPXXAPTKL (SEQ ID NO: 6583):SSLS-AA17-LFF (SEQ ID NO: 6605), TVPKPXXAPTQL (SEQ ID NO: 6575):SSLS-AA17-LFF (SEQ ID NO: 6605), AVPKAXXAPTKL (SEQ ID NO: 6479):SSLS-AA17-LFF (SEQ ID NO: 6605), KVGKAXXVPTKL (SEQ ID NO: 6543):SSLS-AA17-LFF (SEQ ID NO: 6605), KASKAXXVPTKL (SEQ ID NO: 6527):SSLS-AA17-LFF (SEQ ID NO: 6605), GSAGPXXTPTKM (SEQ ID NO: 6497):SSLS-AA17-LFF (SEQ ID NO: 6605), AAPASXXVPARL (SEQ ID NO: 6458):SSLS-AA17-LFF (SEQ ID NO: 6605), STPPTXXVPTRL (SEQ ID NO: 6573):SSLS-AA17-LFF (SEQ ID NO: 6605), HVPKPXXAPTKL (SEQ ID NO: 6503):SSLS-AA17-LFF (SEQ ID NO: 6605), RVPSTXXAPVKT (SEQ ID NO: 6550):SSLS-AA17-LFF (SEQ ID NO: 6605), ASAAPXXVPQAL (SEQ ID NO: 6468):SSLS-AA17-LFF (SEQ ID NO: 6605), ASASPXXVSQDL (SEQ ID NO: 6478):SSLS-AA17-LFF (SEQ ID NO: 6605), ASASPXXVPQDL (SEQ ID NO: 6476):SSLS-AA17-LFF (SEQ ID NO: 6605), NDEGLEXVPTEE (SEQ ID NO: 6545):SSLS-AA17-LFF (SEQ ID NO: 6605), NDEGLEXVPTGQ (SEQ ID NO: 6546):SSLS-AA17-LFF (SEQ ID NO: 6605), SSVKXQPSRVHH (SEQ ID NO: 6565):SSLS-AA17-LFF (SEQ ID NO: 6605), RNVQXRPTQVQL (SEQ ID NO: 6548):SSLS-AA17-LFF (SEQ ID NO: 6605), KIPKAXXAPTEL (SEQ ID NO: 6529):NAIS-AA17-LYF (SEQ ID NO: 6595), GIPEPXXAPTKM (SEQ ID NO: 6487):NAIS-AA17-LYF (SEQ ID NO: 6595), SIPKAXXAPTEL (SEQ ID NO: 6557):NAIS-AA17-LYF (SEQ ID NO: 6595), AVPKAXXAPTKL (SEQ ID NO: 6479):NAIS-AA17-LYF (SEQ ID NO: 6595), KVGKAXXAPTKL (SEQ ID NO: 6537):NAIS-AA17-LYF (SEQ ID NO: 6595), KASKAXXAPTKL (SEQ ID NO: 6521):NAIS-AA17-LYF (SEQ ID NO: 6595), GSAGPXXAPTKM (SEQ ID NO: 6495):NAIS-AA17-LYF (SEQ ID NO: 6595), AAPASXXAPTRL (SEQ ID NO: 6455):NAIS-AA17-LYF (SEQ ID NO: 6595), STPPTXXAPTRL (SEQ ID NO: 6567):NAIS-AA17-LYF (SEQ ID NO: 6595), RVPSTXXAPTKT (SEQ ID NO: 6549):NAIS-AA17-LYF (SEQ ID NO: 6595), ASAAPXXAPTAL (SEQ ID NO: 6463):NAIS-AA17-LYF (SEQ ID NO: 6595), ASASPXXAPTDL (SEQ ID NO: 6471):NAIS-AA17-LYF (SEQ ID NO: 6595), KIPKAXXVPTEL (SEQ ID NO: 6535):NAIS-AA17-LYF (SEQ ID NO: 6595), GIPEPXXVPEKM (SEQ ID NO: 6491):NAIS-AA17-LYF (SEQ ID NO: 6595), SIPKAXXVPTEL (SEQ ID NO: 6563):NAIS-AA17-LYF (SEQ ID NO: 6595), KVGKAXXVPTKL (SEQ ID NO: 6543):NAIS-AA17-LYF (SEQ ID NO: 6595), KASKAXXVPTKL (SEQ ID NO: 6527):NAIS-AA17-LYF (SEQ ID NO: 6595), GSAGPXXTPTKM (SEQ ID NO: 6497):NAIS-AA17-LYF (SEQ ID NO: 6595), AAPASXXVPARL (SEQ ID NO: 6458):NAIS-AA17-LYF (SEQ ID NO: 6595), STPPTXXVPTRL (SEQ ID NO: 6573):NAIS-AA17-LYF (SEQ ID NO: 6595), RVPSTXXAPVKT (SEQ ID NO: 6550):NAIS-AA17-LYF (SEQ ID NO: 6595), ASAAPXXVPQAL (SEQ ID NO: 6468):NAIS-AA17-LYF (SEQ ID NO: 6595), ASASPXXVSQDL (SEQ ID NO: 6478):NAIS-AA17-LYF (SEQ ID NO: 6595), ASASPXXVPQDL (SEQ ID NO: 6476):NAIS-AA17-LYF (SEQ ID NO: 6595), NDEGLEXVPTEE (SEQ ID NO: 6545):NAIS-AA17-LYF (SEQ ID NO: 6595), NDEGLEXVPTGQ (SEQ ID NO: 6546):NAIS-AA17-LYF (SEQ ID NO: 6595), SSVKXQPSRVHH (SEQ ID NO: 6565):NAIS-AA17-LYF (SEQ ID NO: 6595), RNVQXRPTQVQL (SEQ ID NO: 6548):NAIS-AA17-LYF (SEQ ID NO: 6595), KIPKAXXAPTEL (SEQ ID NO: 6529):SATS-AA17-LYY (SEQ ID NO: 6599), GIPEPXXAPTKM (SEQ ID NO: 6487):SATS-AA17-LYY (SEQ ID NO: 6599), SIPKAXXAPTEL (SEQ ID NO: 6557):SATS-AA17-LYY (SEQ ID NO: 6599), HVTKPTXAPTKL (SEQ ID NO: 6511):SATS-AA17-LYY (SEQ ID NO: 6599), YVPKPXXAPTKL (SEQ ID NO: 6583):SATS-AA17-LYY (SEQ ID NO: 6599), TVPKPXXAPTQL (SEQ ID NO: 6575):SATS-AA17-LYY (SEQ ID NO: 6599), KVGKAXXAPTKL (SEQ ID NO: 6537):SATS-AA17-LYY (SEQ ID NO: 6599), KASKAXXAPTKL (SEQ ID NO: 6521):SATS-AA17-LYY (SEQ ID NO: 6599), GSAGPXXAPTKM (SEQ ID NO: 6495):SATS-AA17-LYY (SEQ ID NO: 6599), AAPASXXAPTRL (SEQ ID NO: 6455):SATS-AA17-LYY (SEQ ID NO: 6599), STPPTXXAPTRL (SEQ ID NO: 6567):SATS-AA17-LYY (SEQ ID NO: 6599), HVPKPXXAPTKL (SEQ ID NO: 6503):SATS-AA17-LYY (SEQ ID NO: 6599), RVPSTXXAPTKT (SEQ ID NO: 6549):SATS-AA17-LYY (SEQ ID NO: 6599), ASAAPXXAPTAL (SEQ ID NO: 6463):SATS-AA17-LYY (SEQ ID NO: 6599), ASASPXXAPTDL (SEQ ID NO: 6471):SATS-AA17-LYY (SEQ ID NO: 6599), KIPKAXXVPTEL (SEQ ID NO: 6535):SATS-AA17-LYY (SEQ ID NO: 6599), GIPEPXXVPEKM (SEQ ID NO: 6491):SATS-AA17-LYY (SEQ ID NO: 6599), SIPKAXXVPTEL (SEQ ID NO: 6563):SATS-AA17-LYY (SEQ ID NO: 6599), KVGKAXXVPTKL (SEQ ID NO: 6543):SATS-AA17-LYY (SEQ ID NO: 6599), KASKAXXVPTKL (SEQ ID NO: 6527):SATS-AA17-LYY (SEQ ID NO: 6599), GSAGPXXTPTKM (SEQ ID NO: 6497):SATS-AA17-LYY (SEQ ID NO: 6599), AAPASXXVPARL (SEQ ID NO: 6458):SATS-AA17-LYY (SEQ ID NO: 6599), STPPTXXVPTRL (SEQ ID NO: 6573):SATS-AA17-LYY (SEQ ID NO: 6599), RVPSTXXAPVKT (SEQ ID NO: 6550):SATS-AA17-LYY (SEQ ID NO: 6599), ASAAPXXVPQAL (SEQ ID NO: 6468):SATS-AA17-LYY (SEQ ID NO: 6599), ASASPXXVSQDL (SEQ ID NO: 6478):SATS-AA17-LYY (SEQ ID NO: 6599), ASASPXXVPQDL (SEQ ID NO: 6476):SATS-AA17-LYY (SEQ ID NO: 6599), NDEGLEXVPTEE (SEQ ID NO: 6545):SATS-AA17-LYY (SEQ ID NO: 6599), NDEGLEXVPTGQ (SEQ ID NO: 6546):SATS-AA17-LYY (SEQ ID NO: 6599), SSVKXQPSRVHH (SEQ ID NO: 6565):SATS-AA17-LYY (SEQ ID NO: 6599), RNVQXRPTQVQL (SEQ ID NO: 6548):SATS-AA17-LYY (SEQ ID NO: 6599), KIPKAXXVPTEL (SEQ ID NO: 6535):SPIS-AA17-LYK (SEQ ID NO: 6604), GIPEPXXVPTKM (SEQ ID NO: 6493):SPIS-AA17-LYK (SEQ ID NO: 6604), SIPKAXXVPTEL (SEQ ID NO: 6563):SPIS-AA17-LYK (SEQ ID NO: 6604), HVTKPTXVPTKL (SEQ ID NO: 6519):SPIS-AA17-LYK (SEQ ID NO: 6604), YVPKPXXVPTKL (SEQ ID NO: 6589):SPIS-AA17-LYK (SEQ ID NO: 6604), TVPKPXXVPTQL (SEQ ID NO: 6581):SPIS-AA17-LYK (SEQ ID NO: 6604), AVPKAXXVPTKL (SEQ ID NO: 6485):SPIS-AA17-LYK (SEQ ID NO: 6604), KASKAXXVPTKL (SEQ ID NO: 6527):SPIS-AA17-LYK (SEQ ID NO: 6604), GSAGPXXVPTKM (SEQ ID NO: 6501):SPIS-AA17-LYK (SEQ ID NO: 6604), AAPASXXVPTRL (SEQ ID NO: 6461):SPIS-AA17-LYK (SEQ ID NO: 6604), STPPTXXVPTRL (SEQ ID NO: 6573):SPIS-AA17-LYK (SEQ ID NO: 6604), HVPKPXXVPTKL (SEQ ID NO: 6509):SPIS-AA17-LYK (SEQ ID NO: 6604), RVPSTXXVPTKT (SEQ ID NO: 6555):SPIS-AA17-LYK (SEQ ID NO: 6604), ASAAPXXVPTAL (SEQ ID NO: 6469):SPIS-AA17-LYK (SEQ ID NO: 6604), ASASPXXVPTDL (SEQ ID NO: 6477):SPIS-AA17-LYK (SEQ ID NO: 6604), GIPEPXXVPEKM (SEQ ID NO: 6491):SPIS-AA17-LYK (SEQ ID NO: 6604), HVTKPTXAPTKL (SEQ ID NO: 6511):SPIS-AA17-LYK (SEQ ID NO: 6604), YVPKPXXAPTKL (SEQ ID NO: 6583):SPIS-AA17-LYK (SEQ ID NO: 6604), TVPKPXXAPTQL (SEQ ID NO: 6575):SPIS-AA17-LYK (SEQ ID NO: 6604), AVPKAXXAPTKL (SEQ ID NO: 6479):SPIS-AA17-LYK (SEQ ID NO: 6604), GSAGPXXTPTKM (SEQ ID NO: 6497):SPIS-AA17-LYK (SEQ ID NO: 6604), AAPASXXVPARL (SEQ ID NO: 6458):SPIS-AA17-LYK (SEQ ID NO: 6604), HVPKPXXAPTKL (SEQ ID NO: 6503):SPIS-AA17-LYK (SEQ ID NO: 6604), RVPSTXXAPVKT (SEQ ID NO: 6550):SPIS-AA17-LYK (SEQ ID NO: 6604), ASAAPXXVPQAL (SEQ ID NO: 6468):SPIS-AA17-LYK (SEQ ID NO: 6604), ASASPXXVSQDL (SEQ ID NO: 6478):SPIS-AA17-LYK (SEQ ID NO: 6604), ASASPXXVPQDL (SEQ ID NO: 6476):SPIS-AA17-LYK (SEQ ID NO: 6604), SSVKXQPSRVHH (SEQ ID NO: 6565):SPIS-AA17-LYK (SEQ ID NO: 6604), RNVQXRPTQVQL (SEQ ID NO: 6548):SPIS-AA17-LYK (SEQ ID NO: 6604), KIPKAXXVPTEL (SEQ ID NO: 6535):EPIS-AA17-LYL (SEQ ID NO: 6591), GIPEPXXVPTKM (SEQ ID NO: 6493):EPIS-AA17-LYL (SEQ ID NO: 6591), SIPKAXXVPTEL (SEQ ID NO: 6563):EPIS-AA17-LYL (SEQ ID NO: 6591), HVTKPTXVPTKL (SEQ ID NO: 6519):EPIS-AA17-LYL (SEQ ID NO: 6591), YVPKPXXVPTKL (SEQ ID NO: 6589):EPIS-AA17-LYL (SEQ ID NO: 6591), TVPKPXXVPTQL (SEQ ID NO: 6581):EPIS-AA17-LYL (SEQ ID NO: 6591), AVPKAXXVPTKL (SEQ ID NO: 6485):EPIS-AA17-LYL (SEQ ID NO: 6591), KVGKAXXVPTKL (SEQ ID NO: 6543):EPIS-AA17-LYL (SEQ ID NO: 6591), GSAGPXXVPTKM (SEQ ID NO: 6501):EPIS-AA17-LYL (SEQ ID NO: 6591), AAPASXXVPTRL (SEQ ID NO: 6461):EPIS-AA17-LYL (SEQ ID NO: 6591), STPPTXXVPTRL (SEQ ID NO: 6573):EPIS-AA17-LYL (SEQ ID NO: 6591), HVPKPXXVPTKL (SEQ ID NO: 6509):EPIS-AA17-LYL (SEQ ID NO: 6591), RVPSTXXVPTKT (SEQ ID NO: 6555):EPIS-AA17-LYL (SEQ ID NO: 6591), ASAAPXXVPTAL (SEQ ID NO: 6469):EPIS-AA17-LYL (SEQ ID NO: 6591), ASASPXXVPTDL (SEQ ID NO: 6477):EPIS-AA17-LYL (SEQ ID NO: 6591), GIPEPXXVPEKM (SEQ ID NO: 6491):EPIS-AA17-LYL (SEQ ID NO: 6591), HVTKPTXAPTKL (SEQ ID NO: 6511):EPIS-AA17-LYL (SEQ ID NO: 6591), YVPKPXXAPTKL (SEQ ID NO: 6583):EPIS-AA17-LYL (SEQ ID NO: 6591), TVPKPXXAPTQL (SEQ ID NO: 6575):EPIS-AA17-LYL (SEQ ID NO: 6591), AVPKAXXAPTKL (SEQ ID NO: 6479):EPIS-AA17-LYL (SEQ ID NO: 6591), GSAGPXXTPTKM (SEQ ID NO: 6497):EPIS-AA17-LYL (SEQ ID NO: 6591), AAPASXXVPARL (SEQ ID NO: 6458):EPIS-AA17-LYL (SEQ ID NO: 6591), HVPKPXXAPTKL (SEQ ID NO: 6503):EPIS-AA17-LYL (SEQ ID NO: 6591), RVPSTXXAPVKT (SEQ ID NO: 6550):EPIS-AA17-LYL (SEQ ID NO: 6591), ASAAPXXVPQAL (SEQ ID NO: 6468):EPIS-AA17-LYL (SEQ ID NO: 6591), ASASPXXVSQDL (SEQ ID NO: 6478):EPIS-AA17-LYL (SEQ ID NO: 6591), ASASPXXVPQDL (SEQ ID NO: 6476):EPIS-AA17-LYL (SEQ ID NO: 6591), SSVKXQPSRVHH (SEQ ID NO: 6565):EPIS-AA17-LYL (SEQ ID NO: 6591), RNVQXRPTQVQL (SEQ ID NO: 6548):EPIS-AA17-LYL (SEQ ID NO: 6591), KIPKAXXTPTEL (SEQ ID NO: 6531):SPIN-AA17-LYF (SEQ ID NO: 6601), GIPEPXXTPTKM (SEQ ID NO: 6489):SPIN-AA17-LYF (SEQ ID NO: 6601), SIPKAXXTPTEL (SEQ ID NO: 6559):SPIN-AA17-LYF (SEQ ID NO: 6601), HVTKPTXTPTKL (SEQ ID NO: 6514):SPIN-AA17-LYF (SEQ ID NO: 6601), YVPKPXXTPTKL (SEQ ID NO: 6585):SPIN-AA17-LYF (SEQ ID NO: 6601), TVPKPXXTPTQL (SEQ ID NO: 6577):SPIN-AA17-LYF (SEQ ID NO: 6601), AVPKAXXTPTKL (SEQ ID NO: 6481):SPIN-AA17-LYF (SEQ ID NO: 6601), KVGKAXXTPTKL (SEQ ID NO: 6539):SPIN-AA17-LYF (SEQ ID NO: 6601), KASKAXXTPTKL (SEQ ID NO: 6523):SPIN-AA17-LYF (SEQ ID NO: 6601), AAPASXXTPTRL (SEQ ID NO: 6457):SPIN-AA17-LYF (SEQ ID NO: 6601), STPPTXXTPTRL (SEQ ID NO: 6569):SPIN-AA17-LYF (SEQ ID NO: 6601), HVPKPXXTPTKL (SEQ ID NO: 6505):SPIN-AA17-LYF (SEQ ID NO: 6601), RVPSTXXTPTKT (SEQ ID NO: 6551):SPIN-AA17-LYF (SEQ ID NO: 6601), ASAAPXXTPTAL (SEQ ID NO: 6465):SPIN-AA17-LYF (SEQ ID NO: 6601), ASASPXXTPTDL (SEQ ID NO: 6473):SPIN-AA17-LYF (SEQ ID NO: 6601), KIPKAXXVPTEL (SEQ ID NO: 6535):SPIN-AA17-LYF (SEQ ID NO: 6601), GIPEPXXVPEKM (SEQ ID NO: 6491):SPIN-AA17-LYF (SEQ ID NO: 6601), SIPKAXXVPTEL (SEQ ID NO: 6563):SPIN-AA17-LYF (SEQ ID NO: 6601), HVTKPTXAPTKL (SEQ ID NO: 6511):SPIN-AA17-LYF (SEQ ID NO: 6601), YVPKPXXAPTKL (SEQ ID NO: 6583):SPIN-AA17-LYF (SEQ ID NO: 6601), TVPKPXXAPTQL (SEQ ID NO: 6575):SPIN-AA17-LYF (SEQ ID NO: 6601), AVPKAXXAPTKL (SEQ ID NO: 6479):SPIN-AA17-LYF (SEQ ID NO: 6601), KVGKAXXVPTKL (SEQ ID NO: 6543):SPIN-AA17-LYF (SEQ ID NO: 6601), KASKAXXVPTKL (SEQ ID NO: 6527):SPIN-AA17-LYF (SEQ ID NO: 6601), AAPASXXVPARL (SEQ ID NO: 6458):SPIN-AA17-LYF (SEQ ID NO: 6601), STPPTXXVPTRL (SEQ ID NO: 6573):SPIN-AA17-LYF (SEQ ID NO: 6601), HVPKPXXAPTKL (SEQ ID NO: 6503):SPIN-AA17-LYF (SEQ ID NO: 6601), RVPSTXXAPVKT (SEQ ID NO: 6550):SPIN-AA17-LYF (SEQ ID NO: 6601), ASAAPXXVPQAL (SEQ ID NO: 6468):SPIN-AA17-LYF (SEQ ID NO: 6601), ASASPXXVSQDL (SEQ ID NO: 6478):SPIN-AA17-LYF (SEQ ID NO: 6601), ASASPXXVPQDL (SEQ ID NO: 6476):SPIN-AA17-LYF (SEQ ID NO: 6601), NDEGLEXVPTEE (SEQ ID NO: 6545):SPIN-AA17-LYF (SEQ ID NO: 6601), NDEGLEXVPTGQ (SEQ ID NO: 6546):SPIN-AA17-LYF (SEQ ID NO: 6601), SSVKXQPSRVHH (SEQ ID NO: 6565):SPIN-AA17-LYF (SEQ ID NO: 6601), RNVQXRPTQVQL (SEQ ID NO: 6548):SPIN-AA17-LYF (SEQ ID NO: 6601), KIPKAXXVPAEL (SEQ ID NO: 6532):SPIS-AA17-LYI (SEQ ID NO: 6603), GIPEPXXVPAKM (SEQ ID NO: 6490):SPIS-AA17-LYI (SEQ ID NO: 6603), SIPKAXXVPAEL (SEQ ID NO: 6560):SPIS-AA17-LYI (SEQ ID NO: 6603), HVTKPTXVPAKL (SEQ ID NO: 6516):SPIS-AA17-LYI (SEQ ID NO: 6603), YVPKPXXVPAKL (SEQ ID NO: 6586):SPIS-AA17-LYI (SEQ ID NO: 6603), TVPKPXXVPAQL (SEQ ID NO: 6578):SPIS-AA17-LYI (SEQ ID NO: 6603), AVPKAXXVPAKL (SEQ ID NO: 6482):SPIS-AA17-LYI (SEQ ID NO: 6603), KVGKAXXVPAKL (SEQ ID NO: 6540):SPIS-AA17-LYI (SEQ ID NO: 6603), KASKAXXVPAKL (SEQ ID NO: 6524):SPIS-AA17-LYI (SEQ ID NO: 6603), GSAGPXXVPAKM (SEQ ID NO: 6498):SPIS-AA17-LYI (SEQ ID NO: 6603), STPPTXXVPARL (SEQ ID NO: 6570):SPIS-AA17-LYI (SEQ ID NO: 6603), HVPKPXXVPAKL (SEQ ID NO: 6506):SPIS-AA17-LYI (SEQ ID NO: 6603), RVPSTXXVPAKT (SEQ ID NO: 6552):SPIS-AA17-LYI (SEQ ID NO: 6603), ASAAPXXVPAAL (SEQ ID NO: 6466):SPIS-AA17-LYI (SEQ ID NO: 6603), ASASPXXVPADL (SEQ ID NO: 6474):SPIS-AA17-LYI (SEQ ID NO: 6603), KIPKAXXVPTEL (SEQ ID NO: 6535):SPIS-AA17-LYI (SEQ ID NO: 6603), GIPEPXXVPEKM (SEQ ID NO: 6491):SPIS-AA17-LYI (SEQ ID NO: 6603), SIPKAXXVPTEL (SEQ ID NO: 6563):SPIS-AA17-LYI (SEQ ID NO: 6603), HVTKPTXAPTKL (SEQ ID NO: 6511):SPIS-AA17-LYI (SEQ ID NO: 6603), YVPKPXXAPTKL (SEQ ID NO: 6583):SPIS-AA17-LYI (SEQ ID NO: 6603), TVPKPXXAPTQL (SEQ ID NO: 6575):SPIS-AA17-LYI (SEQ ID NO: 6603), AVPKAXXAPTKL (SEQ ID NO: 6479):SPIS-AA17-LYI (SEQ ID NO: 6603), KVGKAXXVPTKL (SEQ ID NO: 6543):SPIS-AA17-LYI (SEQ ID NO: 6603), KASKAXXVPTKL (SEQ ID NO: 6527):SPIS-AA17-LYI (SEQ ID NO: 6603), GSAGPXXTPTKM (SEQ ID NO: 6497):SPIS-AA17-LYI (SEQ ID NO: 6603), STPPTXXVPTRL (SEQ ID NO: 6573):SPIS-AA17-LYI (SEQ ID NO: 6603), HVPKPXXAPTKL (SEQ ID NO: 6503):SPIS-AA17-LYI (SEQ ID NO: 6603), RVPSTXXAPVKT (SEQ ID NO: 6550):SPIS-AA17-LYI (SEQ ID NO: 6603), ASAAPXXVPQAL (SEQ ID NO: 6468):SPIS-AA17-LYI (SEQ ID NO: 6603), ASASPXXVSQDL (SEQ ID NO: 6478):SPIS-AA17-LYI (SEQ ID NO: 6603), ASASPXXVPQDL (SEQ ID NO: 6476):SPIS-AA17-LYI (SEQ ID NO: 6603), NDEGLEXVPTEE (SEQ ID NO: 6545):SPIS-AA17-LYI (SEQ ID NO: 6603), NDEGLEXVPTGQ (SEQ ID NO: 6546):SPIS-AA17-LYI (SEQ ID NO: 6603), SSVKXQPSRVHH (SEQ ID NO: 6565):SPIS-AA17-LYI (SEQ ID NO: 6603), RNVQXRPTQVQL (SEQ ID NO: 6548):SPIS-AA17-LYI (SEQ ID NO: 6603), KIPKAXXVPTEL (SEQ ID NO: 6535):SPIS-AA17-LFI (SEQ ID NO: 6602), GIPEPXXVPTKM (SEQ ID NO: 6493):SPIS-AA17-LFI (SEQ ID NO: 6602), SIPKAXXVPTEL (SEQ ID NO: 6563):SPIS-AA17-LFI (SEQ ID NO: 6602), HVTKPTXVPTKL (SEQ ID NO: 6519):SPIS-AA17-LFI (SEQ ID NO: 6602), YVPKPXXVPTKL (SEQ ID NO: 6589):SPIS-AA17-LFI (SEQ ID NO: 6602), TVPKPXXVPTQL (SEQ ID NO: 6581):SPIS-AA17-LFI (SEQ ID NO: 6602), AVPKAXXVPTKL (SEQ ID NO: 6485):SPIS-AA17-LFI (SEQ ID NO: 6602), KVGKAXXVPTKL (SEQ ID NO: 6543):SPIS-AA17-LFI (SEQ ID NO: 6602), KASKAXXVPTKL (SEQ ID NO: 6527):SPIS-AA17-LFI (SEQ ID NO: 6602), GSAGPXXVPTKM (SEQ ID NO: 6501):SPIS-AA17-LFI (SEQ ID NO: 6602), AAPASXXVPTRL (SEQ ID NO: 6461):SPIS-AA17-LFI (SEQ ID NO: 6602), HVPKPXXVPTKL (SEQ ID NO: 6509):SPIS-AA17-LFI (SEQ ID NO: 6602), RVPSTXXVPTKT (SEQ ID NO: 6555):SPIS-AA17-LFI (SEQ ID NO: 6602), ASAAPXXVPTAL (SEQ ID NO: 6469):SPIS-AA17-LFI (SEQ ID NO: 6602), ASASPXXVPTDL (SEQ ID NO: 6477):SPIS-AA17-LFI (SEQ ID NO: 6602), GIPEPXXVPEKM (SEQ ID NO: 6491):SPIS-AA17-LFI (SEQ ID NO: 6602), HVTKPTXAPTKL (SEQ ID NO: 6511):SPIS-AA17-LFI (SEQ ID NO: 6602), YVPKPXXAPTKL (SEQ ID NO: 6583):SPIS-AA17-LFI (SEQ ID NO: 6602), TVPKPXXAPTQL (SEQ ID NO: 6575):SPIS-AA17-LFI (SEQ ID NO: 6602), AVPKAXXAPTKL (SEQ ID NO: 6479):SPIS-AA17-LFI (SEQ ID NO: 6602), GSAGPXXTPTKM (SEQ ID NO: 6497):SPIS-AA17-LFI (SEQ ID NO: 6602), AAPASXXVPARL (SEQ ID NO: 6458):SPIS-AA17-LFI (SEQ ID NO: 6602), HVPKPXXAPTKL (SEQ ID NO: 6503):SPIS-AA17-LFI (SEQ ID NO: 6602), RVPSTXXAPVKT (SEQ ID NO: 6550):SPIS-AA17-LFI (SEQ ID NO: 6602), ASAAPXXVPQAL (SEQ ID NO: 6468):SPIS-AA17-LFI (SEQ ID NO: 6602), ASASPXXVSQDL (SEQ ID NO: 6478):SPIS-AA17-LFI (SEQ ID NO: 6602), ASASPXXVPQDL (SEQ ID NO: 6476):SPIS-AA17-LFI (SEQ ID NO: 6602), SSVKXQPSRVHH (SEQ ID NO: 6565):SPIS-AA17-LFI (SEQ ID NO: 6602), RNVQXRPTQVQL (SEQ ID NO: 6548):SPIS-AA17-LFI (SEQ ID NO: 6602), KIPKAXXAPVEL (SEQ ID NO: 6530):KPLS-AA17-LYV (SEQ ID NO: 6594), GIPEPXXAPVKM (SEQ ID NO: 6488):KPLS-AA17-LYV (SEQ ID NO: 6594), SIPKAXXAPVEL (SEQ ID NO: 6558):KPLS-AA17-LYV (SEQ ID NO: 6594), HVTKPTXAPVKL (SEQ ID NO: 6512):KPLS-AA17-LYV (SEQ ID NO: 6594), YVPKPXXAPVKL (SEQ ID NO: 6584):KPLS-AA17-LYV (SEQ ID NO: 6594), TVPKPXXAPVQL (SEQ ID NO: 6576):KPLS-AA17-LYV (SEQ ID NO: 6594), AVPKAXXAPVKL (SEQ ID NO: 6480):KPLS-AA17-LYV (SEQ ID NO: 6594), KVGKAXXAPVKL (SEQ ID NO: 6538):KPLS-AA17-LYV (SEQ ID NO: 6594), KASKAXXAPVKL (SEQ ID NO: 6522):KPLS-AA17-LYV (SEQ ID NO: 6594), GSAGPXXAPVKM (SEQ ID NO: 6496):KPLS-AA17-LYV (SEQ ID NO: 6594), AAPASXXAPVRL (SEQ ID NO: 6456):KPLS-AA17-LYV (SEQ ID NO: 6594), STPPTXXAPVRL (SEQ ID NO: 6568):KPLS-AA17-LYV (SEQ ID NO: 6594), HVPKPXXAPVKL (SEQ ID NO: 6504):KPLS-AA17-LYV (SEQ ID NO: 6594), ASAAPXXAPVAL (SEQ ID NO: 6464):KPLS-AA17-LYV (SEQ ID NO: 6594), ASASPXXAPVDL (SEQ ID NO: 6472):KPLS-AA17-LYV (SEQ ID NO: 6594), KIPKAXXVPTEL (SEQ ID NO: 6535):KPLS-AA17-LYV (SEQ ID NO: 6594), GIPEPXXVPEKM (SEQ ID NO: 6491):KPLS-AA17-LYV (SEQ ID NO: 6594), SIPKAXXVPTEL (SEQ ID NO: 6563):KPLS-AA17-LYV (SEQ ID NO: 6594), HVTKPTXAPTKL (SEQ ID NO: 6511):KPLS-AA17-LYV (SEQ ID NO: 6594), YVPKPXXAPTKL (SEQ ID NO: 6583):KPLS-AA17-LYV (SEQ ID NO: 6594), TVPKPXXAPTQL (SEQ ID NO: 6575):KPLS-AA17-LYV (SEQ ID NO: 6594), AVPKAXXAPTKL (SEQ ID NO: 6479):KPLS-AA17-LYV (SEQ ID NO: 6594), KVGKAXXVPTKL (SEQ ID NO: 6543):KPLS-AA17-LYV (SEQ ID NO: 6594), KASKAXXVPTKL (SEQ ID NO: 6527):KPLS-AA17-LYV (SEQ ID NO: 6594), GSAGPXXTPTKM (SEQ ID NO: 6497):KPLS-AA17-LYV (SEQ ID NO: 6594), AAPASXXVPARL (SEQ ID NO: 6458):KPLS-AA17-LYV (SEQ ID NO: 6594), STPPTXXVPTRL (SEQ ID NO: 6573):KPLS-AA17-LYV (SEQ ID NO: 6594), HVPKPXXAPTKL (SEQ ID NO: 6503):KPLS-AA17-LYV (SEQ ID NO: 6594), ASAAPXXVPQAL (SEQ ID NO: 6468):KPLS-AA17-LYV (SEQ ID NO: 6594), ASASPXXVSQDL (SEQ ID NO: 6478):KPLS-AA17-LYV (SEQ ID NO: 6594), ASASPXXVPQDL (SEQ ID NO: 6476):KPLS-AA17-LYV (SEQ ID NO: 6594), NDEGLEXVPTEE (SEQ ID NO: 6545):KPLS-AA17-LYV (SEQ ID NO: 6594), NDEGLEXVPTGQ (SEQ ID NO: 6546):KPLS-AA17-LYV (SEQ ID NO: 6594), SSVKXQPSRVHH (SEQ ID NO: 6565):KPLS-AA17-LYV (SEQ ID NO: 6594), RNVQXRPTQVQL (SEQ ID NO: 6548):KPLS-AA17-LYV (SEQ ID NO: 6594), KIPKAXXVPQEL (SEQ ID NO: 6534):EPLP-AA17-VYY (SEQ ID NO: 6592), GIPEPXXVPQKM (SEQ ID NO: 6492):EPLP-AA17-VYY (SEQ ID NO: 6592), SIPKAXXVPQEL (SEQ ID NO: 6562):EPLP-AA17-VYY (SEQ ID NO: 6592), HVTKPTXVPQKL (SEQ ID NO: 6518):EPLP-AA17-VYY (SEQ ID NO: 6592), YVPKPXXVPQKL (SEQ ID NO: 6588):EPLP-AA17-VYY (SEQ ID NO: 6592), TVPKPXXVPQQL (SEQ ID NO: 6580):EPLP-AA17-VYY (SEQ ID NO: 6592), AVPKAXXVPQKL (SEQ ID NO: 6484):EPLP-AA17-VYY (SEQ ID NO: 6592), KVGKAXXVPQKL (SEQ ID NO: 6542):EPLP-AA17-VYY (SEQ ID NO: 6592), KASKAXXVPQKL (SEQ ID NO: 6526):EPLP-AA17-VYY (SEQ ID NO: 6592), GSAGPXXVPQKM (SEQ ID NO: 6500):EPLP-AA17-VYY (SEQ ID NO: 6592), AAPASXXVPQRL (SEQ ID NO: 6460):EPLP-AA17-VYY (SEQ ID NO: 6592), STPPTXXVPQRL (SEQ ID NO: 6572):EPLP-AA17-VYY (SEQ ID NO: 6592), HVPKPXXVPQKL (SEQ ID NO: 6508):EPLP-AA17-VYY (SEQ ID NO: 6592), RVPSTXXVPQKT (SEQ ID NO: 6554):EPLP-AA17-VYY (SEQ ID NO: 6592), ASASPXXVPQDL (SEQ ID NO: 6476):EPLP-AA17-VYY (SEQ ID NO: 6592), KIPKAXXVPTEL (SEQ ID NO: 6535):EPLP-AA17-VYY (SEQ ID NO: 6592), GIPEPXXVPEKM (SEQ ID NO: 6491):EPLP-AA17-VYY (SEQ ID NO: 6592), SIPKAXXVPTEL (SEQ ID NO: 6563):EPLP-AA17-VYY (SEQ ID NO: 6592), HVTKPTXAPTKL (SEQ ID NO: 6511):EPLP-AA17-VYY (SEQ ID NO: 6592), YVPKPXXAPTKL (SEQ ID NO: 6583):EPLP-AA17-VYY (SEQ ID NO: 6592), TVPKPXXAPTQL (SEQ ID NO: 6575):EPLP-AA17-VYY (SEQ ID NO: 6592), AVPKAXXAPTKL (SEQ ID NO: 6479):EPLP-AA17-VYY (SEQ ID NO: 6592), KVGKAXXVPTKL (SEQ ID NO: 6543):EPLP-AA17-VYY (SEQ ID NO: 6592), KASKAXXVPTKL (SEQ ID NO: 6527):EPLP-AA17-VYY (SEQ ID NO: 6592), GSAGPXXTPTKM (SEQ ID NO: 6497):EPLP-AA17-VYY (SEQ ID NO: 6592), AAPASXXVPARL (SEQ ID NO: 6458):EPLP-AA17-VYY (SEQ ID NO: 6592), STPPTXXVPTRL (SEQ ID NO: 6573):EPLP-AA17-VYY (SEQ ID NO: 6592), HVPKPXXAPTKL (SEQ ID NO: 6503):EPLP-AA17-VYY (SEQ ID NO: 6592), RVPSTXXAPVKT (SEQ ID NO: 6550):EPLP-AA17-VYY (SEQ ID NO: 6592), ASASPXXVSQDL (SEQ ID NO: 6478):EPLP-AA17-VYY (SEQ ID NO: 6592), NDEGLEXVPTEE (SEQ ID NO: 6545):EPLP-AA17-VYY (SEQ ID NO: 6592), NDEGLEXVPTGQ (SEQ ID NO: 6546):EPLP-AA17-VYY (SEQ ID NO: 6592), SSVKXQPSRVHH (SEQ ID NO: 6565):EPLP-AA17-VYY (SEQ ID NO: 6592), RNVQXRPTQVQL (SEQ ID NO: 6548):EPLP-AA17-VYY (SEQ ID NO: 6592), KIPKAXXVSQEL (SEQ ID NO: 6536):EPLT-AA17-LYY (SEQ ID NO: 6593), GIPEPXXVSQKM (SEQ ID NO: 6494):EPLT-AA17-LYY (SEQ ID NO: 6593), SIPKAXXVSQEL (SEQ ID NO: 6564):EPLT-AA17-LYY (SEQ ID NO: 6593), HVTKPTXVSQKL (SEQ ID NO: 6520):EPLT-AA17-LYY (SEQ ID NO: 6593), YVPKPXXVSQKL (SEQ ID NO: 6590):EPLT-AA17-LYY (SEQ ID NO: 6593), TVPKPXXVSQQL (SEQ ID NO: 6582):EPLT-AA17-LYY (SEQ ID NO: 6593), AVPKAXXVSQKL (SEQ ID NO: 6486):EPLT-AA17-LYY (SEQ ID NO: 6593), KVGKAXXVSQKL (SEQ ID NO: 6544):EPLT-AA17-LYY (SEQ ID NO: 6593), KASKAXXVSQKL (SEQ ID NO: 6528):EPLT-AA17-LYY (SEQ ID NO: 6593), GSAGPXXVSQKM (SEQ ID NO: 6502):EPLT-AA17-LYY (SEQ ID NO: 6593), AAPASXXVSQRL (SEQ ID NO: 6462):EPLT-AA17-LYY (SEQ ID NO: 6593), STPPTXXVSQRL (SEQ ID NO: 6574):EPLT-AA17-LYY (SEQ ID NO: 6593), HVPKPXXVSQKL (SEQ ID NO: 6510):EPLT-AA17-LYY (SEQ ID NO: 6593), RVPSTXXVSQKT (SEQ ID NO: 6556):EPLT-AA17-LYY (SEQ ID NO: 6593), ASAAPXXVSQAL (SEQ ID NO: 6470):EPLT-AA17-LYY (SEQ ID NO: 6593), ASASPXXVSQDL (SEQ ID NO: 6478):EPLT-AA17-LYY (SEQ ID NO: 6593), KIPKAXXVPTEL (SEQ ID NO: 6535):EPLT-AA17-LYY (SEQ ID NO: 6593), GIPEPXXVPEKM (SEQ ID NO: 6491):EPLT-AA17-LYY (SEQ ID NO: 6593), SIPKAXXVPTEL (SEQ ID NO: 6563):EPLT-AA17-LYY (SEQ ID NO: 6593), HVTKPTXAPTKL (SEQ ID NO: 6511):EPLT-AA17-LYY (SEQ ID NO: 6593), YVPKPXXAPTKL (SEQ ID NO: 6583):EPLT-AA17-LYY (SEQ ID NO: 6593), TVPKPXXAPTQL (SEQ ID NO: 6575):EPLT-AA17-LYY (SEQ ID NO: 6593), AVPKAXXAPTKL (SEQ ID NO: 6479):EPLT-AA17-LYY (SEQ ID NO: 6593), KVGKAXXVPTKL (SEQ ID NO: 6543):EPLT-AA17-LYY (SEQ ID NO: 6593), KASKAXXVPTKL (SEQ ID NO: 6527):EPLT-AA17-LYY (SEQ ID NO: 6593), GSAGPXXTPTKM (SEQ ID NO: 6497):EPLT-AA17-LYY (SEQ ID NO: 6593), AAPASXXVPARL (SEQ ID NO: 6458):EPLT-AA17-LYY (SEQ ID NO: 6593), STPPTXXVPTRL (SEQ ID NO: 6573):EPLT-AA17-LYY (SEQ ID NO: 6593), HVPKPXXAPTKL (SEQ ID NO: 6503):EPLT-AA17-LYY (SEQ ID NO: 6593), RVPSTXXAPVKT (SEQ ID NO: 6550):EPLT-AA17-LYY (SEQ ID NO: 6593), ASAAPXXVPQAL (SEQ ID NO: 6468):EPLT-AA17-LYY (SEQ ID NO: 6593), NDEGLEXVPTEE (SEQ ID NO: 6545):EPLT-AA17-LYY (SEQ ID NO: 6593), NDEGLEXVPTGQ (SEQ ID NO: 6546):EPLT-AA17-LYY (SEQ ID NO: 6593), SSVKXQPSRVHH (SEQ ID NO: 6565):EPLT-AA17-LYY (SEQ ID NO: 6593), RNVQXRPTQVQL (SEQ ID NO: 6548):EPLT-AA17-LYY (SEQ ID NO: 6593), KIPKAXXVPQEL (SEQ ID NO: 6534):EPLT-AA17-LYY (SEQ ID NO: 6593), GIPEPXXVPQKM (SEQ ID NO: 6492):EPLT-AA17-LYY (SEQ ID NO: 6593), SIPKAXXVPQEL (SEQ ID NO: 6562):EPLT-AA17-LYY (SEQ ID NO: 6593), HVTKPTXVPQKL (SEQ ID NO: 6518):EPLT-AA17-LYY (SEQ ID NO: 6593), YVPKPXXVPQKL (SEQ ID NO: 6588):EPLT-AA17-LYY (SEQ ID NO: 6593), TVPKPXXVPQQL (SEQ ID NO: 6580):EPLT-AA17-LYY (SEQ ID NO: 6593), AVPKAXXVPQKL (SEQ ID NO: 6484):EPLT-AA17-LYY (SEQ ID NO: 6593), KVGKAXXVPQKL (SEQ ID NO: 6542):EPLT-AA17-LYY (SEQ ID NO: 6593), KASKAXXVPQKL (SEQ ID NO: 6526):EPLT-AA17-LYY (SEQ ID NO: 6593), GSAGPXXVPQKM (SEQ ID NO: 6500):EPLT-AA17-LYY (SEQ ID NO: 6593), AAPASXXVPQRL (SEQ ID NO: 6460):EPLT-AA17-LYY (SEQ ID NO: 6593), STPPTXXVPQRL (SEQ ID NO: 6572):EPLT-AA17-LYY (SEQ ID NO: 6593), HVPKPXXVPQKL (SEQ ID NO: 6508):EPLT-AA17-LYY (SEQ ID NO: 6593), RVPSTXXVPQKT (SEQ ID NO: 6554):EPLT-AA17-LYY (SEQ ID NO: 6593), ASASPXXVPQDL (SEQ ID NO: 6476):EPLT-AA17-LYY (SEQ ID NO: 6593), NDEGLEXVPTGQ (SEQ ID NO: 6546):SNIT-AA17-QIM (SEQ ID NO: 6600), GIPEPXXVPEKM (SEQ ID NO: 6491):SNIT-AA17-QIM (SEQ ID NO: 6600), HVTKPTXAPTKL (SEQ ID NO: 6511):SNIT-AA17-QIM (SEQ ID NO: 6600), YVPKPXXAPTKL (SEQ ID NO: 6583):SNIT-AA17-QIM (SEQ ID NO: 6600), TVPKPXXAPTQL (SEQ ID NO: 6575):SNIT-AA17-QIM (SEQ ID NO: 6600), AVPKAXXAPTKL (SEQ ID NO: 6479):SNIT-AA17-QIM (SEQ ID NO: 6600), GSAGPXXTPTKM (SEQ ID NO: 6497):SNIT-AA17-QIM (SEQ ID NO: 6600), AAPASXXVPARL (SEQ ID NO: 6458):SNIT-AA17-QIM (SEQ ID NO: 6600), HVPKPXXAPTKL (SEQ ID NO: 6503):SNIT-AA17-QIM (SEQ ID NO: 6600), RVPSTXXAPVKT (SEQ ID NO: 6550):SNIT-AA17-QIM (SEQ ID NO: 6600), ASAAPXXVPQAL (SEQ ID NO: 6468):SNIT-AA17-QIM (SEQ ID NO: 6600), ASASPXXVSQDL (SEQ ID NO: 6478):SNIT-AA17-QIM (SEQ ID NO: 6600), ASASPXXVPQDL (SEQ ID NO: 6476):SNIT-AA17-QIM (SEQ ID NO: 6600), SSVKXQPSRVHH (SEQ ID NO: 6565):SNIT-AA17-QIM (SEQ ID NO: 6600), RNVQXRPTQVQL (SEQ ID NO: 6548):SNIT-AA17-QIM (SEQ ID NO: 6600), RNVQXRPSRVQL (SEQ ID NO: 6547):RSVK-AA17-AKV (SEQ ID NO: 6597), KIPKAXXVPTEL (SEQ ID NO: 6535):RSVK-AA17-AKV (SEQ ID NO: 6597), GIPEPXXVPEKM (SEQ ID NO: 6491):RSVK-AA17-AKV (SEQ ID NO: 6597), SIPKAXXVPTEL (SEQ ID NO: 6563):RSVK-AA17-AKV (SEQ ID NO: 6597), HVTKPTXAPTKL (SEQ ID NO: 6511):RSVK-AA17-AKV (SEQ ID NO: 6597), YVPKPXXAPTKL (SEQ ID NO: 6583):RSVK-AA17-AKV (SEQ ID NO: 6597), TVPKPXXAPTQL (SEQ ID NO: 6575):RSVK-AA17-AKV (SEQ ID NO: 6597), AVPKAXXAPTKL (SEQ ID NO: 6479):RSVK-AA17-AKV (SEQ ID NO: 6597), KVGKAXXVPTKL (SEQ ID NO: 6543):RSVK-AA17-AKV (SEQ ID NO: 6597), KASKAXXVPTKL (SEQ ID NO: 6527):RSVK-AA17-AKV (SEQ ID NO: 6597), GSAGPXXTPTKM (SEQ ID NO: 6497):RSVK-AA17-AKV (SEQ ID NO: 6597), AAPASXXVPARL (SEQ ID NO: 6458):RSVK-AA17-AKV (SEQ ID NO: 6597), STPPTXXVPTRL (SEQ ID NO: 6573):RSVK-AA17-AKV (SEQ ID NO: 6597), HVPKPXXAPTKL (SEQ ID NO: 6503):RSVK-AA17-AKV (SEQ ID NO: 6597), RVPSTXXAPVKT (SEQ ID NO: 6550):RSVK-AA17-AKV (SEQ ID NO: 6597), ASAAPXXVPQAL (SEQ ID NO: 6468):RSVK-AA17-AKV (SEQ ID NO: 6597), ASASPXXVSQDL (SEQ ID NO: 6478):RSVK-AA17-AKV (SEQ ID NO: 6597), ASASPXXVPQDL (SEQ ID NO: 6476):RSVK-AA17-AKV (SEQ ID NO: 6597), NDEGLEXVPTEE (SEQ ID NO: 6545):RSVK-AA17-AKV (SEQ ID NO: 6597), NDEGLEXVPTGQ (SEQ ID NO: 6546):RSVK-AA17-AKV (SEQ ID NO: 6597), RNVQXRPTQVOL (SEQ ID NO: 6548):RSVK-AA17-AKV (SEQ ID NO: 6597), SSVKXQPTQVHH (SEQ ID NO: 6566):RPVQ-AA17-RKI (SEQ ID NO: 6596), KIPKAXXVPTEL (SEQ ID NO: 6535):RPVQ-AA17-RKI (SEQ ID NO: 6596), GIPEPXXVPEKM (SEQ ID NO: 6491):RPVQ-AA17-RKI (SEQ ID NO: 6596), SIPKAXXVPTEL (SEQ ID NO: 6563):RPVQ-AA17-RKI (SEQ ID NO: 6596), HVTKPTXAPTKL (SEQ ID NO: 6511):RPVQ-AA17-RKI (SEQ ID NO: 6596), YVPKPXXAPTKL (SEQ ID NO: 6583):RPVQ-AA17-RKI (SEQ ID NO: 6596), TVPKPXXAPTQL (SEQ ID NO: 6575):RPVQ-AA17-RKI (SEQ ID NO: 6596), AVPKAXXAPTKL (SEQ ID NO: 6479):RPVQ-AA17-RKI (SEQ ID NO: 6596), KVGKAXXVPTKL (SEQ ID NO: 6543):RPVQ-AA17-RKI (SEQ ID NO: 6596), KASKAXXVPTKL (SEQ ID NO: 6527):RPVQ-AA17-RKI (SEQ ID NO: 6596), GSAGPXXTPTKM (SEQ ID NO: 6497):RPVQ-AA17-RKI (SEQ ID NO: 6596), AAPASXXVPARL (SEQ ID NO: 6458):RPVQ-AA17-RKI (SEQ ID NO: 6596), STPPTXXVPTRL (SEQ ID NO: 6573):RPVQ-AA17-RKI (SEQ ID NO: 6596), HVPKPXXAPTKL (SEQ ID NO: 6503):RPVQ-AA17-RKI (SEQ ID NO: 6596), RVPSTXXAPVKT (SEQ ID NO: 6550):RPVQ-AA17-RKI (SEQ ID NO: 6596), ASAAPXXVPQAL (SEQ ID NO: 6468):RPVQ-AA17-RKI (SEQ ID NO: 6596), ASASPXXVSQDL (SEQ ID NO: 6478):RPVQ-AA17-RKI (SEQ ID NO: 6596), ASASPXXVPQDL (SEQ ID NO: 6476):RPVQ-AA17-RKI (SEQ ID NO: 6596), NDEGLEXVPTEE (SEQ ID NO: 6545):RPVQ-AA17-RKI (SEQ ID NO: 6596), NDEGLEXVPTGQ (SEQ ID NO: 6546):RPVQ-AA17-RKI (SEQ ID NO: 6596) and SSVKXQPSRVHH (SEQ ID NO: 6565):RPVQ-AA17-RKI (SEQ ID NO: 6596); and wherein AA¹⁷ is selected from the group consisting of G, A, V, L, I, P, F, M, W, T and S (in particular is selected from the group consisting of M, I, L, V and T).

[0312] In certain embodiments, the triplet PEP7:PEP3:PEP1 is selected from the group consisting of GIPEPXX (SEQ ID NO: 6440):VPT:SAIS (SEQ ID NO: 6360), HVTKPTX (SEQ ID NO: 6443):VPT:SAIS (SEQ ID NO: 6360), YVPKPXX (SEQ ID NO: 6454):VPT:SAIS (SEQ ID NO: 6360), TVPKPXX (SEQ ID NO: 6453):VPT:SAIS (SEQ ID NO: 6360), AVPKAXX (SEQ ID NO: 6439):VPT:SAIS (SEQ ID NO: 6360), KVGKAXX (SEQ ID NO: 6446):VPT:SAIS (SEQ ID NO: 6360), KASKAXX (SEQ ID NO: 6444):VPT:SAIS (SEQ ID NO: 6360), GSAGPXX (SEQ ID NO: 6441):VPT:SAIS (SEQ ID NO: 6360), AAPASXX (SEQ ID NO: 6436):VPT:SAIS (SEQ ID NO: 6360), STPPTXX (SEQ ID NO: 6452):VPT:SAIS (SEQ ID NO: 6360), HVPKPXX (SEQ ID NO: 6442):VPT:SAIS (SEQ ID NO: 6360), RVPSTXX (SEQ ID NO: 6449):VPT:SAIS (SEQ ID NO: 6360), ASAAPXX (SEQ ID NO: 6437):VPT:SAIS (SEQ ID NO: 6360), ASASPXX (SEQ ID NO: 6438):VPT:SAIS (SEQ ID NO: 6360), GIPEPXX (SEQ ID NO: 6440):VPE:SAIS (SEQ ID NO: 6360), HVTKPTX (SEQ ID NO: 6443):APT:SAIS (SEQ ID NO: 6360), YVPKPXX (SEQ ID NO: 6454):APT:SAIS (SEQ ID NO: 6360), TVPKPXX (SEQ ID NO: 6453):APT:SAIS (SEQ ID NO: 6360), AVPKAXX (SEQ ID NO: 6439):APT:SAIS (SEQ ID NO: 6360), GSAGPXX (SEQ ID NO: 6441):TPT:SAIS (SEQ ID NO: 6360), AAPASXX (SEQ ID NO: 6436):VPA:SAIS (SEQ ID NO: 6360), HVPKPXX (SEQ ID NO: 6442):APT:SAIS (SEQ ID NO: 6360), RVPSTXX (SEQ ID NO: 6449):APV:SAIS (SEQ ID NO: 6360), ASAAPXX (SEQ ID NO: 6437):VPQ:SAIS (SEQ ID NO: 6360), ASASPXX (SEQ ID NO: 6438):VSQ:SAIS (SEQ ID NO: 6360), ASASPXX (SEQ ID NO: 6438):VPQ:SAIS (SEQ ID NO: 6360), SSVKXQP (SEQ ID NO: 6451):SRV:SAIS (SEQ ID NO: 6360), RNVQXRP (SEQ ID NO: 6448):TQV:SAIS (SEQ ID NO: 6360), KIPKAXX (SEQ ID NO: 6445):VPE:SSLS (SEQ ID NO: 6365), SIPKAXX (SEQ ID NO: 6450):VPE:SSLS (SEQ ID NO: 6365), HVTKPTX (SEQ ID NO: 6443):VPE:SSLS (SEQ ID NO: 6365), YVPKPXX (SEQ ID NO: 6454):VPE:SSLS (SEQ ID NO: 6365), TVPKPXX (SEQ ID NO: 6453):VPE:SSLS (SEQ ID NO: 6365), AVPKAXX (SEQ ID NO: 6439):VPE:SSLS (SEQ ID NO: 6365), KVGKAXX (SEQ ID NO: 6446):VPE:SSLS (SEQ ID NO: 6365), KASKAXX (SEQ ID NO: 6444):VPE:SSLS (SEQ ID NO: 6365), GSAGPXX (SEQ ID NO: 6441):VPE:SSLS (SEQ ID NO: 6365), AAPASXX (SEQ ID NO: 6436):VPE:SSLS (SEQ ID NO: 6365), STPPTXX (SEQ ID NO: 6452):VPE:SSLS (SEQ ID NO: 6365), HVPKPXX (SEQ ID NO: 6442):VPE:SSLS (SEQ ID NO: 6365), RVPSTXX (SEQ ID NO: 6449):VPE:SSLS (SEQ ID NO: 6365), ASAAPXX (SEQ ID NO: 6437):VPE:SSLS (SEQ ID NO: 6365), ASASPXX (SEQ ID NO: 6438):VPE:SSLS (SEQ ID NO: 6365), KIPKAXX (SEQ ID NO: 6445):VPT:SSLS (SEQ ID NO: 6365), SIPKAXX (SEQ ID NO: 6450):VPT:SSLS (SEQ ID NO: 6365), HVTKPTX (SEQ ID NO: 6443):APT:SSLS (SEQ ID NO: 6365), YVPKPXX (SEQ ID NO: 6454):APT:SSLS (SEQ ID NO: 6365), TVPKPXX (SEQ ID NO: 6453):APT:SSLS (SEQ ID NO: 6365), AVPKAXX (SEQ ID NO: 6439):APT:SSLS (SEQ ID NO: 6365), KVGKAXX (SEQ ID NO: 6446):VPT:SSLS (SEQ ID NO: 6365), KASKAXX (SEQ ID NO: 6444):VPT:SSLS (SEQ ID NO: 6365), GSAGPXX (SEQ ID NO: 6441):TPT:SSLS (SEQ ID NO: 6365), AAPASXX (SEQ ID NO: 6436):VPA:SSLS (SEQ ID NO: 6365), STPPTXX (SEQ ID NO: 6452):VPT:SSLS (SEQ ID NO: 6365), HVPKPXX (SEQ ID NO: 6442):APT:SSLS (SEQ ID NO: 6365), RVPSTXX (SEQ ID NO: 6449):APV:SSLS (SEQ ID NO: 6365), ASAAPXX (SEQ ID NO: 6437):VPQ:SSLS (SEQ ID NO: 6365), ASASPXX (SEQ ID NO: 6438):VSQ:SSLS (SEQ ID NO: 6365), ASASPXX (SEQ ID NO: 6438):VPQ:SSLS (SEQ ID NO: 6365), NDEGLEX (SEQ ID NO: 6447):VPT:SSLS (SEQ ID NO: 6365), SSVKXQP (SEQ ID NO: 6451):SRV:SSLS (SEQ ID NO: 6365), RNVQXRP (SEQ ID NO: 6448):TQV:SSLS (SEQ ID NO: 6365), KIPKAXX (SEQ ID NO: 6445):APT:NAIS (SEQ ID NO: 6357), GIPEPXX (SEQ ID NO: 6440):APT:NAIS (SEQ ID NO: 6357), SIPKAXX (SEQ ID NO: 6450):APT:NAIS (SEQ ID NO: 6357), AVPKAXX (SEQ ID NO: 6439):APT:NAIS (SEQ ID NO: 6357), KVGKAXX (SEQ ID NO: 6446)APT:NAIS (SEQ ID NO: 6357), KASKAXX (SEQ ID NO: 6444):APT:NAIS (SEQ ID NO: 6357), GSAGPXX (SEQ ID NO: 6441):APT:NAIS (SEQ ID NO: 6357), AAPASXX (SEQ ID NO: 6436):APT:NAIS (SEQ ID NO: 6357), STPPTXX (SEQ ID NO: 6452):APT:NAIS (SEQ ID NO: 6357), RVPSTXX (SEQ ID NO: 6449)APT:NAIS (SEQ ID NO: 6357), ASAAPXX (SEQ ID NO: 6437):APT:NAIS (SEQ ID NO: 6357), ASASPXX (SEQ ID NO: 6438):APT:NAIS (SEQ ID NO: 6357), KIPKAXX (SEQ ID NO: 6445):VPT:NAIS (SEQ ID NO: 6357), GIPEPXX (SEQ ID NO: 6440):VPE:NAIS (SEQ ID NO: 6357), SIPKAXX (SEQ ID NO: 6450):VPT:NAIS (SEQ ID NO: 6357), KVGKAXX (SEQ ID NO: 6446):VPT:NAIS (SEQ ID NO: 6357), KASKAXX (SEQ ID NO: 6444):VPT:NAIS (SEQ ID NO: 6357), GSAGPXX (SEQ ID NO: 6441):TPT:NAIS (SEQ ID NO: 6357), AAPASXX (SEQ ID NO: 6436):VPA:NAIS (SEQ ID NO: 6357), STPPTXX (SEQ ID NO: 6452):VPT:NAIS (SEQ ID NO: 6357), RVPSTXX (SEQ ID NO: 6449):APV:NAIS (SEQ ID NO: 6357), ASAAPXX (SEQ ID NO: 6437):VPQ:NAIS (SEQ ID NO: 6357), ASASPXX (SEQ ID NO: 6438):VSQ:NAIS (SEQ ID NO: 6357), ASASPXX (SEQ ID NO: 6438):VPQ:NAIS (SEQ ID NO: 6357), NDEGLEX (SEQ ID NO: 6447):VPT:NAIS (SEQ ID NO: 6357), SSVKXQP (SEQ ID NO: 6451):SRV:NAIS (SEQ ID NO: 6357), RNVQXRP (SEQ ID NO: 6448):TQV:NAIS (SEQ ID NO: 6357), KIPKAXX (SEQ ID NO: 6445):APT:SATS (SEQ ID NO: 6361), GIPEPXX (SEQ ID NO: 6440):APT:SATS (SEQ ID NO: 6361), SIPKAXX (SEQ ID NO: 6450):APT:SATS (SEQ ID NO: 6361), HVTKPTX (SEQ ID NO: 6443):APT:SATS (SEQ ID NO: 6361), YVPKPXX (SEQ ID NO: 6454):APT:SATS (SEQ ID NO: 6361), TVPKPXX (SEQ ID NO: 6453):APT:SATS (SEQ ID NO: 6361), KVGKAXX (SEQ ID NO: 6446):APT:SATS (SEQ ID NO: 6361), KASKAXX (SEQ ID NO: 6444):APT:SATS (SEQ ID NO: 6361), GSAGPXX (SEQ ID NO: 6441)APT:SATS (SEQ ID NO: 6361), AAPASXX (SEQ ID NO: 6436):APT:SATS (SEQ ID NO: 6361), STPPTXX (SEQ ID NO: 6452):APT:SATS (SEQ ID NO: 6361), HVPKPXX (SEQ ID NO: 6442)APT:SATS (SEQ ID NO: 6361), RVPSTXX (SEQ ID NO: 6449):APT:SATS (SEQ ID NO: 6361), ASAAPXX (SEQ ID NO: 6437):APT:SATS (SEQ ID NO: 6361), ASASPXX (SEQ ID NO: 6438):APT:SATS (SEQ ID NO: 6361), KIPKAXX (SEQ ID NO: 6445):VPT:SATS (SEQ ID NO: 6361), GIPEPXX (SEQ ID NO: 6440):VPE:SATS (SEQ ID NO: 6361), SIPKAXX (SEQ ID NO: 6450):VPT:SATS (SEQ ID NO: 6361), KVGKAXX (SEQ ID NO: 6446):VPT:SATS (SEQ ID NO: 6361), KASKAXX (SEQ ID NO: 6444):VPT:SATS (SEQ ID NO: 6361), GSAGPXX (SEQ ID NO: 6441):TPT:SATS (SEQ ID NO: 6361), AAPASXX (SEQ ID NO: 6436):VPA:SATS (SEQ ID NO: 6361), STPPTXX (SEQ ID NO: 6452):VPT:SATS (SEQ ID NO: 6361), RVPSTXX (SEQ ID NO: 6449):APV:SATS (SEQ ID NO: 6361), ASAAPXX (SEQ ID NO: 6437):VPQ:SATS (SEQ ID NO: 6361), ASASPXX (SEQ ID NO: 6438):VSQ:SATS (SEQ ID NO: 6361), ASASPXX (SEQ ID NO: 6438):VPQ:SATS (SEQ ID NO: 6361), NDEGLEX (SEQ ID NO: 6447):VPT:SATS (SEQ ID NO: 6361), SSVKXQP (SEQ ID NO: 6451):SRV:SATS (SEQ ID NO: 6361), RNVQXRP (SEQ ID NO: 6448):TQV:SATS (SEQ ID NO: 6361), KIPKAXX (SEQ ID NO: 6445):VPT:SPIS (SEQ ID NO: 6364), GIPEPXX (SEQ ID NO: 6440):VPT:SPIS (SEQ ID NO: 6364), SIPKAXX (SEQ ID NO: 6450):VPT:SPIS (SEQ ID NO: 6364), HVTKPTX (SEQ ID NO: 6443):VPT:SPIS (SEQ ID NO: 6364), YVPKPXX (SEQ ID NO: 6454):VPT:SPIS (SEQ ID NO: 6364), TVPKPXX (SEQ ID NO: 6453):VPT:SPIS (SEQ ID NO: 6364), AVPKAXX (SEQ ID NO: 6439):VPT:SPIS (SEQ ID NO: 6364), KASKAXX (SEQ ID NO: 6444):VPT:SPIS (SEQ ID NO: 6364), GSAGPXX (SEQ ID NO: 6441):VPT:SPIS (SEQ ID NO: 6364), AAPASXX (SEQ ID NO: 6436):VPT:SPIS (SEQ ID NO: 6364), STPPTXX (SEQ ID NO: 6452):VPT:SPIS (SEQ ID NO: 6364), HVPKPXX (SEQ ID NO: 6442):VPT:SPIS (SEQ ID NO: 6364), RVPSTXX (SEQ ID NO: 6449):VPT:SPIS (SEQ ID NO: 6364), ASAAPXX (SEQ ID NO: 6437):VPT:SPIS (SEQ ID NO: 6364), ASASPXX (SEQ ID NO: 6438):VPT:SPIS (SEQ ID NO: 6364), GIPEPXX (SEQ ID NO: 6440):VPE:SPIS (SEQ ID NO: 6364), HVTKPTX (SEQ ID NO: 6443):APT:SPIS (SEQ ID NO: 6364), YVPKPXX (SEQ ID NO: 6454):APT:SPIS (SEQ ID NO: 6364), TVPKPXX (SEQ ID NO: 6453):APT:SPIS (SEQ ID NO: 6364), AVPKAXX (SEQ ID NO: 6439):APT:SPIS (SEQ ID NO: 6364), GSAGPXX (SEQ ID NO: 6441):TPT:SPIS (SEQ ID NO: 6364), AAPASXX (SEQ ID NO: 6436):VPA:SPIS (SEQ ID NO: 6364), HVPKPXX (SEQ ID NO: 6442):APT:SPIS (SEQ ID NO: 6364), RVPSTXX (SEQ ID NO: 6449):APV:SPIS (SEQ ID NO: 6364), ASAAPXX (SEQ ID NO: 6437):VPQ:SPIS (SEQ ID NO: 6364), ASASPXX (SEQ ID NO: 6438):VSQ:SPIS (SEQ ID NO: 6364), ASASPXX (SEQ ID NO: 6438):VPQ:SPIS (SEQ ID NO: 6364), SSVKXQP (SEQ ID NO: 6451):SRV:SPIS (SEQ ID NO: 6364), RNVQXRP (SEQ ID NO: 6448):TQV:SPIS (SEQ ID NO: 6364), KIPKAXX (SEQ ID NO: 6445):VPT:EPIS (SEQ ID NO: 6353), GIPEPXX (SEQ ID NO: 6440):VPT:EPIS (SEQ ID NO: 6353), SIPKAXX (SEQ ID NO: 6450):VPT:EPIS (SEQ ID NO: 6353), HVTKPTX (SEQ ID NO: 6443):VPT:EPIS (SEQ ID NO: 6353), YVPKPXX (SEQ ID NO: 6454):VPT:EPIS (SEQ ID NO: 6353), TVPKPXX (SEQ ID NO: 6453):VPT:EPIS (SEQ ID NO: 6353), AVPKAXX (SEQ ID NO: 6439):VPT:EPIS (SEQ ID NO: 6353), KVGKAXX (SEQ ID NO: 6446):VPT:EPIS (SEQ ID NO: 6353), GSAGPXX (SEQ ID NO: 6441):VPT:EPIS (SEQ ID NO: 6353), AAPASXX (SEQ ID NO: 6436):VPT:EPIS (SEQ ID NO: 6353), STPPTXX (SEQ ID NO: 6452):VPT:EPIS (SEQ ID NO: 6353), HVPKPXX (SEQ ID NO: 6442):VPT:EPIS (SEQ ID NO: 6353), RVPSTXX (SEQ ID NO: 6449):VPT:EPIS (SEQ ID NO: 6353), ASAAPXX (SEQ ID NO: 6437):VPT:EPIS (SEQ ID NO: 6353), ASASPXX (SEQ ID NO: 6438):VPT:EPIS (SEQ ID NO: 6353), GIPEPXX (SEQ ID NO: 6440):VPE:EPIS (SEQ ID NO: 6353), HVTKPTX (SEQ ID NO: 6443)APT:EPIS (SEQ ID NO: 6353), YVPKPXX (SEQ ID NO: 6454):APT:EPIS (SEQ ID NO: 6353), TVPKPXX (SEQ ID NO: 6453):APT:EPIS (SEQ ID NO: 6353), AVPKAXX (SEQ ID NO: 6439):APT:EPIS (SEQ ID NO: 6353), GSAGPXX (SEQ ID NO: 6441):TPT:EPIS (SEQ ID NO: 6353), AAPASXX (SEQ ID NO: 6436):VPA:EPIS (SEQ ID NO: 6353), HVPKPXX (SEQ ID NO: 6442):APT:EPIS (SEQ ID NO: 6353), RVPSTXX (SEQ ID NO: 6449):APV:EPIS (SEQ ID NO: 6353), ASAAPXX (SEQ ID NO: 6437):VPQ:EPIS (SEQ ID NO: 6353), ASASPXX (SEQ ID NO: 6438):VSQ:EPIS (SEQ ID NO: 6353), ASASPXX (SEQ ID NO: 6438):VPQ:EPIS (SEQ ID NO: 6353), SSVKXQP (SEQ ID NO: 6451):SRV:EPIS (SEQ ID NO: 6353), RNVQXRP (SEQ ID NO: 6448):TQV:EPIS (SEQ ID NO: 6353), KIPKAXX (SEQ ID NO: 6445):TPT:SPIN (SEQ ID NO: 6363), GIPEPXX (SEQ ID NO: 6440):TPT:SPIN (SEQ ID NO: 6363), SIPKAXX (SEQ ID NO: 6450):TPT:SPIN (SEQ ID NO: 6363), HVTKPTX (SEQ ID NO: 6443):TPT:SPIN (SEQ ID NO: 6363), YVPKPXX (SEQ ID NO: 6454):TPT:SPIN (SEQ ID NO: 6363), TVPKPXX (SEQ ID NO: 6453):TPT:SPIN (SEQ ID NO: 6363), AVPKAXX (SEQ ID NO: 6439):TPT:SPIN (SEQ ID NO: 6363), KVGKAXX (SEQ ID NO: 6446):TPT:SPIN (SEQ ID NO: 6363), KASKAXX (SEQ ID NO: 6444):TPT:SPIN (SEQ ID NO: 6363), AAPASXX (SEQ ID NO: 6436):TPT:SPIN (SEQ ID NO: 6363), STPPTXX (SEQ ID NO: 6452):TPT:SPIN (SEQ ID NO: 6363), HVPKPXX (SEQ ID NO: 6442):TPT:SPIN (SEQ ID NO: 6363), RVPSTXX (SEQ ID NO: 6449):TPT:SPIN (SEQ ID NO: 6363), ASAAPXX (SEQ ID NO: 6437):TPT:SPIN (SEQ ID NO: 6363), ASASPXX (SEQ ID NO: 6438):TPT:SPIN (SEQ ID NO: 6363), KIPKAXX (SEQ ID NO: 6445):VPT:SPIN (SEQ ID NO: 6363), GIPEPXX (SEQ ID NO: 6440):VPE:SPIN (SEQ ID NO: 6363), SIPKAXX (SEQ ID NO: 6450):VPT:SPIN (SEQ ID NO: 6363), HVTKPTX (SEQ ID NO: 6443):APT:SPIN (SEQ ID NO: 6363), YVPKPXX (SEQ ID NO: 6454)APT:SPIN (SEQ ID NO: 6363), TVPKPXX (SEQ ID NO: 6453):APT:SPIN (SEQ ID NO: 6363), AVPKAXX (SEQ ID NO: 6439):APT:SPIN (SEQ ID NO: 6363), KVGKAXX (SEQ ID NO: 6446):VPT:SPIN (SEQ ID NO: 6363), KASKAXX (SEQ ID NO: 6444):VPT:SPIN (SEQ ID NO: 6363), AAPASXX (SEQ ID NO: 6436):VPA:SPIN (SEQ ID NO: 6363), STPPTXX (SEQ ID NO: 6452):VPT:SPIN (SEQ ID NO: 6363), HVPKPXX (SEQ ID NO: 6442):APT:SPIN (SEQ ID NO: 6363), RVPSTXX (SEQ ID NO: 6449):APV:SPIN (SEQ ID NO: 6363), ASAAPXX (SEQ ID NO: 6437):VPQ:SPIN (SEQ ID NO: 6363), ASASPXX (SEQ ID NO: 6438):VSQ:SPIN (SEQ ID NO: 6363), ASASPXX (SEQ ID NO: 6438):VPQ:SPIN (SEQ ID NO: 6363), NDEGLEX (SEQ ID NO: 6447):VPT:SPIN (SEQ ID NO: 6363), SSVKXQP (SEQ ID NO: 6451):SRV:SPIN (SEQ ID NO: 6363), RNVQXRP (SEQ ID NO: 6448):TQV:SPIN (SEQ ID NO: 6363), KIPKAXX (SEQ ID NO: 6445):VPA:SPIS (SEQ ID NO: 6364), GIPEPXX (SEQ ID NO: 6440):VPA:SPIS (SEQ ID NO: 6364), SIPKAXX (SEQ ID NO: 6450):VPA:SPIS (SEQ ID NO: 6364), HVTKPTX (SEQ ID NO: 6443):VPA:SPIS (SEQ ID NO: 6364), YVPKPXX (SEQ ID NO: 6454):VPA:SPIS (SEQ ID NO: 6364), TVPKPXX (SEQ ID NO: 6453):VPA:SPIS (SEQ ID NO: 6364), AVPKAXX (SEQ ID NO: 6439):VPA:SPIS (SEQ ID NO: 6364), KVGKAXX (SEQ ID NO: 6446):VPA:SPIS (SEQ ID NO: 6364), KASKAXX (SEQ ID NO: 6444):VPA:SPIS (SEQ ID NO: 6364), GSAGPXX (SEQ ID NO: 6441):VPA:SPIS (SEQ ID NO: 6364), STPPTXX (SEQ ID NO: 6452):VPA:SPIS (SEQ ID NO: 6364), HVPKPXX (SEQ ID NO: 6442):VPA:SPIS (SEQ ID NO: 6364), RVPSTXX (SEQ ID NO: 6449):VPA:SPIS (SEQ ID NO: 6364), ASAAPXX (SEQ ID NO: 6437):VPA:SPIS (SEQ ID NO: 6364), ASASPXX (SEQ ID NO: 6438):VPA:SPIS (SEQ ID NO: 6364), KVGKAXX (SEQ ID NO: 6446):VPT:SPIS (SEQ ID NO: 6364), NDEGLEX (SEQ ID NO: 6447):VPT:SPIS (SEQ ID NO: 6364), KIPKAXX (SEQ ID NO: 6445):APV:KPLS (SEQ ID NO: 6356), GIPEPXX (SEQ ID NO: 6440):APV:KPLS (SEQ ID NO: 6356), SIPKAXX (SEQ ID NO: 6450):APV:KPLS (SEQ ID NO: 6356), HVTKPTX (SEQ ID NO: 6443):APV:KPLS (SEQ ID NO: 6356), YVPKPXX (SEQ ID NO: 6454):APV:KPLS (SEQ ID NO: 6356), TVPKPXX (SEQ ID NO: 6453):APV:KPLS (SEQ ID NO: 6356), AVPKAXX (SEQ ID NO: 6439):APV:KPLS (SEQ ID NO: 6356), KVGKAXX (SEQ ID NO: 6446):APV:KPLS (SEQ ID NO: 6356), KASKAXX (SEQ ID NO: 6444):APV:KPLS (SEQ ID NO: 6356), GSAGPXX (SEQ ID NO: 6441)APV:KPLS (SEQ ID NO: 6356), AAPASXX (SEQ ID NO: 6436):APV:KPLS (SEQ ID NO: 6356), STPPTXX (SEQ ID NO: 6452)APV:KPLS (SEQ ID NO: 6356), HVPKPXX (SEQ ID NO: 6442)APV:KPLS (SEQ ID NO: 6356), ASAAPXX (SEQ ID NO: 6437):APV:KPLS (SEQ ID NO: 6356), ASASPXX (SEQ ID NO: 6438):APV:KPLS (SEQ ID NO: 6356), KIPKAXX (SEQ ID NO: 6445):VPT:KPLS (SEQ ID NO: 6356), GIPEPXX (SEQ ID NO: 6440):VPE:KPLS (SEQ ID NO: 6356), SIPKAXX (SEQ ID NO: 6450):VPT:KPLS (SEQ ID NO: 6356), HVTKPTX (SEQ ID NO: 6443):APT:KPLS (SEQ ID NO: 6356), YVPKPXX (SEQ ID NO: 6454):APT:KPLS (SEQ ID NO: 6356), TVPKPXX (SEQ ID NO: 6453):APT:KPLS (SEQ ID NO: 6356), AVPKAXX (SEQ ID NO: 6439):APT:KPLS (SEQ ID NO: 6356), KVGKAXX (SEQ ID NO: 6446):VPT:KPLS (SEQ ID NO: 6356), KASKAXX (SEQ ID NO: 6444):VPT:KPLS (SEQ ID NO: 6356), GSAGPXX (SEQ ID NO: 6441):TPT:KPLS (SEQ ID NO: 6356), AAPASXX (SEQ ID NO: 6436):VPA:KPLS (SEQ ID NO: 6356), STPPTXX (SEQ ID NO: 6452):VPT:KPLS (SEQ ID NO: 6356), HVPKPXX (SEQ ID NO: 6442):APT:KPLS (SEQ ID NO: 6356), ASAAPXX (SEQ ID NO: 6437):VPQ:KPLS (SEQ ID NO: 6356), ASASPXX (SEQ ID NO: 6438):VSQ:KPLS (SEQ ID NO: 6356), ASASPXX (SEQ ID NO: 6438):VPQ:KPLS (SEQ ID NO: 6356), NDEGLEX (SEQ ID NO: 6447):VPT:KPLS (SEQ ID NO: 6356), SSVKXQP (SEQ ID NO: 6451):SRV:KPLS (SEQ ID NO: 6356), RNVQXRP (SEQ ID NO: 6448):TQV:KPLS (SEQ ID NO: 6356), KIPKAXX (SEQ ID NO: 6445):VPQ:EPLP (SEQ ID NO: 6354), GIPEPXX (SEQ ID NO: 6440):VPQ:EPLP (SEQ ID NO: 6354), SIPKAXX (SEQ ID NO: 6450):VPQ:EPLP (SEQ ID NO: 6354), HVTKPTX (SEQ ID NO: 6443):VPQ:EPLP (SEQ ID NO: 6354), YVPKPXX (SEQ ID NO: 6454):VPQ:EPLP (SEQ ID NO: 6354), TVPKPXX (SEQ ID NO: 6453):VPQ:EPLP (SEQ ID NO: 6354), AVPKAXX (SEQ ID NO: 6439):VPQ:EPLP (SEQ ID NO: 6354), KVGKAXX (SEQ ID NO: 6446):VPQ:EPLP (SEQ ID NO: 6354), KASKAXX (SEQ ID NO: 6444):VPQ:EPLP (SEQ ID NO: 6354), GSAGPXX (SEQ ID NO: 6441):VPQ:EPLP (SEQ ID NO: 6354), AAPASXX (SEQ ID NO: 6436):VPQ:EPLP (SEQ ID NO: 6354), STPPTXX (SEQ ID NO: 6452):VPQ:EPLP (SEQ ID NO: 6354), HVPKPXX (SEQ ID NO: 6442):VPQ:EPLP (SEQ ID NO: 6354), RVPSTXX (SEQ ID NO: 6449):VPQ:EPLP (SEQ ID NO: 6354), ASASPXX (SEQ ID NO: 6438):VPQ:EPLP (SEQ ID NO: 6354), KIPKAXX (SEQ ID NO: 6445):VPT:EPLP (SEQ ID NO: 6354), GIPEPXX (SEQ ID NO: 6440):VPE:EPLP (SEQ ID NO: 6354), SIPKAXX (SEQ ID NO: 6450):VPT:EPLP (SEQ ID NO: 6354), HVTKPTX (SEQ ID NO: 6443):APT:EPLP (SEQ ID NO: 6354), YVPKPXX (SEQ ID NO: 6454):APT:EPLP (SEQ ID NO: 6354), TVPKPXX (SEQ ID NO: 6453):APT:EPLP (SEQ ID NO: 6354), AVPKAXX (SEQ ID NO: 6439):APT:EPLP (SEQ ID NO: 6354), KVGKAXX (SEQ ID NO: 6446):VPT:EPLP (SEQ ID NO: 6354), KASKAXX (SEQ ID NO: 6444):VPT:EPLP (SEQ ID NO: 6354), GSAGPXX (SEQ ID NO: 6441):TPT:EPLP (SEQ ID NO: 6354), AAPASXX (SEQ ID NO: 6436):VPA:EPLP (SEQ ID NO: 6354), STPPTXX (SEQ ID NO: 6452):VPT:EPLP (SEQ ID NO: 6354), HVPKPXX (SEQ ID NO: 6442):APT:EPLP (SEQ ID NO: 6354), RVPSTXX (SEQ ID NO: 6449):APV:EPLP (SEQ ID NO: 6354), ASASPXX (SEQ ID NO: 6438):VSQ:EPLP (SEQ ID NO: 6354), NDEGLEX (SEQ ID NO: 6447):VPT:EPLP (SEQ ID NO: 6354), SSVKXQP (SEQ ID NO: 6451):SRV:EPLP (SEQ ID NO: 6354), RNVQXRP (SEQ ID NO: 6448):TQV:EPLP (SEQ ID NO: 6354), KIPKAXX (SEQ ID NO: 6445):VSQ:EPLT (SEQ ID NO: 6355), GIPEPXX (SEQ ID NO: 6440):VSQ:EPLT (SEQ ID NO: 6355), SIPKAXX (SEQ ID NO: 6450):VSQ:EPLT (SEQ ID NO: 6355), HVTKPTX (SEQ ID NO: 6443):VSQ:EPLT (SEQ ID NO: 6355), YVPKPXX (SEQ ID NO: 6454):VSQ:EPLT (SEQ ID NO: 6355), TVPKPXX (SEQ ID NO: 6453):VSQ:EPLT (SEQ ID NO: 6355), AVPKAXX (SEQ ID NO: 6439):VSQ:EPLT (SEQ ID NO: 6355), KVGKAXX (SEQ ID NO: 6446):VSQ:EPLT (SEQ ID NO: 6355), KASKAXX (SEQ ID NO: 6444):VSQ:EPLT (SEQ ID NO: 6355), GSAGPXX (SEQ ID NO: 6441):VSQ:EPLT (SEQ ID NO: 6355), AAPASXX (SEQ ID NO: 6436):VSQ:EPLT (SEQ ID NO: 6355), STPPTXX (SEQ ID NO: 6452):VSQ:EPLT (SEQ ID NO: 6355), HVPKPXX (SEQ ID NO: 6442):VSQ:EPLT (SEQ ID NO: 6355), RVPSTXX (SEQ ID NO: 6449):VSQ:EPLT (SEQ ID NO: 6355), ASAAPXX (SEQ ID NO: 6437):VSQ:EPLT (SEQ ID NO: 6355), ASASPXX (SEQ ID NO: 6438):VSQ:EPLT (SEQ ID NO: 6355), KIPKAXX (SEQ ID NO: 6445):VPT:EPLT (SEQ ID NO: 6355), GIPEPXX (SEQ ID NO: 6440):VPE:EPLT (SEQ ID NO: 6355), SIPKAXX (SEQ ID NO: 6450):VPT:EPLT (SEQ ID NO: 6355), HVTKPTX (SEQ ID NO: 6443):APT:EPLT (SEQ ID NO: 6355), YVPKPXX (SEQ ID NO: 6454):APT:EPLT (SEQ ID NO: 6355), TVPKPXX (SEQ ID NO: 6453)APT:EPLT (SEQ ID NO: 6355), AVPKAXX (SEQ ID NO: 6439):APT:EPLT (SEQ ID NO: 6355), KVGKAXX (SEQ ID NO: 6446):VPT:EPLT (SEQ ID NO: 6355), KASKAXX (SEQ ID NO: 6444):VPT:EPLT (SEQ ID NO: 6355), GSAGPXX (SEQ ID NO: 6441):TPT:EPLT (SEQ ID NO: 6355), AAPASXX (SEQ ID NO: 6436):VPA:EPLT (SEQ ID NO: 6355), STPPTXX (SEQ ID NO: 6452):VPT:EPLT (SEQ ID NO: 6355), HVPKPXX (SEQ ID NO: 6442):APT:EPLT (SEQ ID NO: 6355), RVPSTXX (SEQ ID NO: 6449):APV:EPLT (SEQ ID NO: 6355), ASAAPXX (SEQ ID NO: 6437):VPQ:EPLT (SEQ ID NO: 6355), NDEGLEX (SEQ ID NO: 6447):VPT:EPLT (SEQ ID NO: 6355), SSVKXQP (SEQ ID NO: 6451):SRV:EPLT (SEQ ID NO: 6355), RNVQXRP (SEQ ID NO: 6448):TQV:EPLT (SEQ ID NO: 6355), KIPKAXX (SEQ ID NO: 6445):VPQ:EPLT (SEQ ID NO: 6355), GIPEPXX (SEQ ID NO: 6440):VPQ:EPLT (SEQ ID NO: 6355), SIPKAXX (SEQ ID NO: 6450):VPQ:EPLT (SEQ ID NO: 6355), HVTKPTX (SEQ ID NO: 6443):VPQ:EPLT (SEQ ID NO: 6355), YVPKPXX (SEQ ID NO: 6454):VPQ:EPLT (SEQ ID NO: 6355), TVPKPXX (SEQ ID NO: 6453):VPQ:EPLT (SEQ ID NO: 6355), AVPKAXX (SEQ ID NO: 6439):VPQ:EPLT (SEQ ID NO: 6355), KVGKAXX (SEQ ID NO: 6446):VPQ:EPLT (SEQ ID NO: 6355), KASKAXX (SEQ ID NO: 6444):VPQ:EPLT (SEQ ID NO: 6355), GSAGPXX (SEQ ID NO: 6441):VPQ:EPLT (SEQ ID NO: 6355), AAPASXX (SEQ ID NO: 6436):VPQ:EPLT (SEQ ID NO: 6355), STPPTXX (SEQ ID NO: 6452):VPQ:EPLT (SEQ ID NO: 6355), HVPKPXX (SEQ ID NO: 6442):VPQ:EPLT (SEQ ID NO: 6355), RVPSTXX (SEQ ID NO: 6449):VPQ:EPLT (SEQ ID NO: 6355), ASASPXX (SEQ ID NO: 6438):VPQ:EPLT (SEQ ID NO: 6355), NDEGLEX (SEQ ID NO: 6447):VPT:SNIT (SEQ ID NO: 6362), GIPEPXX (SEQ ID NO: 6440):VPE:SNIT (SEQ ID NO: 6362), HVTKPTX (SEQ ID NO: 6443):APT:SNIT (SEQ ID NO: 6362), YVPKPXX (SEQ ID NO: 6454):APT:SNIT (SEQ ID NO: 6362), TVPKPXX (SEQ ID NO: 6453):APT:SNIT (SEQ ID NO: 6362), AVPKAXX (SEQ ID NO: 6439):APT:SNIT (SEQ ID NO: 6362), GSAGPXX (SEQ ID NO: 6441):TPT:SNIT (SEQ ID NO: 6362), AAPASXX (SEQ ID NO: 6436):VPA:SNIT (SEQ ID NO: 6362), HVPKPXX (SEQ ID NO: 6442):APT:SNIT (SEQ ID NO: 6362), RVPSTXX (SEQ ID NO: 6449):APV:SNIT (SEQ ID NO: 6362), ASAAPXX (SEQ ID NO: 6437):VPQ:SNIT (SEQ ID NO: 6362), ASASPXX (SEQ ID NO: 6438):VSQ:SNIT (SEQ ID NO: 6362), ASASPXX (SEQ ID NO: 6438):VPQ:SNIT (SEQ ID NO: 6362), SSVKXQP (SEQ ID NO: 6451):SRV:SNIT (SEQ ID NO: 6362), RNVQXRP (SEQ ID NO: 6448):TQV:SNIT (SEQ ID NO: 6362), RNVQXRP (SEQ ID NO: 6448):SRV:RSVK (SEQ ID NO: 6359), KIPKAXX (SEQ ID NO: 6445):VPT:RSVK (SEQ ID NO: 6359), GIPEPXX (SEQ ID NO: 6440):VPE:RSVK (SEQ ID NO: 6359), SIPKAXX (SEQ ID NO: 6450):VPT:RSVK (SEQ ID NO: 6359), HVTKPTX (SEQ ID NO: 6443):APT:RSVK (SEQ ID NO: 6359), YVPKPXX (SEQ ID NO: 6454)APT:RSVK (SEQ ID NO: 6359), TVPKPXX (SEQ ID NO: 6453):APT:RSVK (SEQ ID NO: 6359), AVPKAXX (SEQ ID NO: 6439):APT:RSVK (SEQ ID NO: 6359), KVGKAXX (SEQ ID NO: 6446):VPT:RSVK (SEQ ID NO: 6359), KASKAXX (SEQ ID NO: 6444):VPT:RSVK (SEQ ID NO: 6359), GSAGPXX (SEQ ID NO: 6441):TPT:RSVK (SEQ ID NO: 6359), AAPASXX (SEQ ID NO: 6436):VPA:RSVK (SEQ ID NO: 6359), STPPTXX (SEQ ID NO: 6452):VPT:RSVK (SEQ ID NO: 6359), HVPKPXX (SEQ ID NO: 6442):APT:RSVK (SEQ ID NO: 6359), RVPSTXX (SEQ ID NO: 6449):APV:RSVK (SEQ ID NO: 6359), ASAAPXX (SEQ ID NO: 6437):VPQ:RSVK (SEQ ID NO: 6359), ASASPXX (SEQ ID NO: 6438):VSQ:RSVK (SEQ ID NO: 6359), ASASPXX (SEQ ID NO: 6438):VPQ:RSVK (SEQ ID NO: 6359), NDEGLEX (SEQ ID NO: 6447):VPT:RSVK (SEQ ID NO: 6359), RNVQXRP (SEQ ID NO: 6448):TQV:RSVK (SEQ ID NO: 6359), SSVKXQP (SEQ ID NO: 6451):TQV:RPVQ (SEQ ID NO: 6358), KIPKAXX (SEQ ID NO: 6445):VPT:RPVQ (SEQ ID NO: 6358), GIPEPXX (SEQ ID NO: 6440):VPE:RPVQ (SEQ ID NO: 6358), SIPKAXX (SEQ ID NO: 6450):VPT:RPVQ (SEQ ID NO: 6358), HVTKPTX (SEQ ID NO: 6443):APT:RPVQ (SEQ ID NO: 6358), YVPKPXX (SEQ ID NO: 6454):APT:RPVQ (SEQ ID NO: 6358), TVPKPXX (SEQ ID NO: 6453):APT:RPVQ (SEQ ID NO: 6358), AVPKAXX (SEQ ID NO: 6439):APT:RPVQ (SEQ ID NO: 6358), KVGKAXX (SEQ ID NO: 6446):VPT:RPVQ (SEQ ID NO: 6358), KASKAXX (SEQ ID NO: 6444):VPT:RPVQ (SEQ ID NO: 6358), GSAGPXX (SEQ ID NO: 6441):TPT:RPVQ (SEQ ID NO: 6358), AAPASXX (SEQ ID NO: 6436):VPA:RPVQ (SEQ ID NO: 6358), STPPTXX (SEQ ID NO: 6452):VPT:RPVQ (SEQ ID NO: 6358), HVPKPXX (SEQ ID NO: 6442):APT:RPVQ (SEQ ID NO: 6358), RVPSTXX (SEQ ID NO: 6449):APV:RPVQ (SEQ ID NO: 6358), ASAAPXX (SEQ ID NO: 6437):VPQ:RPVQ (SEQ ID NO: 6358), ASASPXX (SEQ ID NO: 6438):VSQ:RPVQ (SEQ ID NO: 6358), ASASPXX (SEQ ID NO: 6438):VPQ:RPVQ (SEQ ID NO: 6358), NDEGLEX (SEQ ID NO: 6447):VPT:RPVQ (SEQ ID NO: 6358) and SSVKXQP (SEQ ID NO: 6451):SRV:RPVQ (SEQ ID NO: 6358).

[0313] In certain embodiments, the triplet PEP7:PEP3:PEP12 is selected from the group consisting of GIPEPXX (SEQ ID NO: 6440):VPT:SAIS-AA17-LYL (SEQ ID NO: 6598), HVTKPTX (SEQ ID NO: 6443):VPT:SAIS-AA17-LYL (SEQ ID NO: 6598), YVPKPXX (SEQ ID NO: 6454):VPT:SAIS-AA17-LYL (SEQ ID NO: 6598), TVPKPXX (SEQ ID NO: 6453):VPT:SAIS-AA17-LYL (SEQ ID NO: 6598), AVPKAXX (SEQ ID NO: 6439):VPT:SAIS-AA17-LYL (SEQ ID NO: 6598), KVGKAXX (SEQ ID NO: 6446):VPT:SAIS-AA17-LYL (SEQ ID NO: 6598), KASKAXX (SEQ ID NO: 6444):VPT:SAIS-AA17-LYL (SEQ ID NO: 6598), GSAGPXX (SEQ ID NO: 6441):VPT:SAIS-AA17-LYL (SEQ ID NO: 6598), AAPASXX (SEQ ID NO: 6436):VPT:SAIS-AA17-LYL (SEQ ID NO: 6598), STPPTXX (SEQ ID NO: 6452):VPT:SAIS-AA17-LYL (SEQ ID NO: 6598), HVPKPXX (SEQ ID NO: 6442):VPT:SAIS-AA17-LYL (SEQ ID NO: 6598), RVPSTXX (SEQ ID NO: 6449):VPT:SAIS-AA17-LYL (SEQ ID NO: 6598), ASAAPXX (SEQ ID NO: 6437):VPT:SAIS-AA17-LYL (SEQ ID NO: 6598), ASASPXX (SEQ ID NO: 6438):VPT:SAIS-AA17-LYL (SEQ ID NO: 6598), GIPEPXX (SEQ ID NO: 6440):VPE:SAIS-AA17-LYL (SEQ ID NO: 6598), HVTKPTX (SEQ ID NO: 6443):APT:SAIS-AA17-LYL (SEQ ID NO: 6598), YVPKPXX (SEQ ID NO: 6454):APT:SAIS-AA17-LYL (SEQ ID NO: 6598), TVPKPXX (SEQ ID NO: 6453):APT:SAIS-AA17-LYL (SEQ ID NO: 6598), AVPKAXX (SEQ ID NO: 6439):APT:SAIS-AA17-LYL (SEQ ID NO: 6598), GSAGPXX (SEQ ID NO: 6441):TPT:SAIS-AA17-LYL (SEQ ID NO: 6598), AAPASXX (SEQ ID NO: 6436):VPA:SAIS-AA17-LYL (SEQ ID NO: 6598), HVPKPXX (SEQ ID NO: 6442):APT:SAIS-AA17-LYL (SEQ ID NO: 6598), RVPSTXX (SEQ ID NO: 6449):APV:SAIS-AA17-LYL (SEQ ID NO: 6598), ASAAPXX (SEQ ID NO: 6437):VPQ:SAIS-AA17-LYL (SEQ ID NO: 6598), ASASPXX (SEQ ID NO: 6438):VSQ:SAIS-AA17-LYL (SEQ ID NO: 6598), ASASPXX (SEQ ID NO: 6438):VPQ:SAIS-AA17-LYL (SEQ ID NO: 6598), SSVKXQP (SEQ ID NO: 6451):SRV:SAIS-AA17-LYL (SEQ ID NO: 6598), RNVQXRP (SEQ ID NO: 6448):TQV:SAIS-AA17-LYL (SEQ ID NO: 6598), KIPKAXX (SEQ ID NO: 6445):VPE:SSLS-AA17-LFF (SEQ ID NO: 6605), SIPKAXX (SEQ ID NO: 6450):VPE:SSLS-AA17-LFF (SEQ ID NO: 6605), HVTKPTX (SEQ ID NO: 6443):VPE:SSLS-AA17-LFF (SEQ ID NO: 6605), YVPKPXX (SEQ ID NO: 6454):VPE:SSLS-AA17-LFF (SEQ ID NO: 6605), TVPKPXX (SEQ ID NO: 6453):VPE:SSLS-AA17-LFF (SEQ ID NO: 6605), AVPKAXX (SEQ ID NO: 6439):VPE:SSLS-AA17-LFF (SEQ ID NO: 6605), KVGKAXX (SEQ ID NO: 6446):VPE:SSLS-AA17-LFF (SEQ ID NO: 6605), KASKAXX (SEQ ID NO: 6444):VPE:SSLS-AA17-LFF (SEQ ID NO: 6605), GSAGPXX (SEQ ID NO: 6441):VPE:SSLS-AA17-LFF (SEQ ID NO: 6605), AAPASXX (SEQ ID NO: 6436):VPE:SSLS-AA17-LFF (SEQ ID NO: 6605), STPPTXX (SEQ ID NO: 6452):VPE:SSLS-AA17-LFF (SEQ ID NO: 6605), HVPKPXX (SEQ ID NO: 6442):VPE:SSLS-AA17-LFF (SEQ ID NO: 6605), RVPSTXX (SEQ ID NO: 6449):VPE:SSLS-AA17-LFF (SEQ ID NO: 6605), ASAAPXX (SEQ ID NO: 6437):VPE:SSLS-AA17-LFF (SEQ ID NO: 6605), ASASPXX (SEQ ID NO: 6438):VPE:SSLS-AA17-LFF (SEQ ID NO: 6605), KIPKAXX (SEQ ID NO: 6445):VPT:SSLS-AA17-LFF (SEQ ID NO: 6605), SIPKAXX (SEQ ID NO: 6450):VPT:SSLS-AA17-LFF (SEQ ID NO: 6605), HVTKPTX (SEQ ID NO: 6443):APT:SSLS-AA17-LFF (SEQ ID NO: 6605), YVPKPXX (SEQ ID NO: 6454):APT:SSLS-AA17-LFF (SEQ ID NO: 6605), TVPKPXX (SEQ ID NO: 6453):APT:SSLS-AA17-LFF (SEQ ID NO: 6605), AVPKAXX (SEQ ID NO: 6439):APT:SSLS-AA17-LFF (SEQ ID NO: 6605), KVGKAXX (SEQ ID NO: 6446):VPT:SSLS-AA17-LFF (SEQ ID NO: 6605), KASKAXX (SEQ ID NO: 6444):VPT:SSLS-AA17-LFF (SEQ ID NO: 6605), GSAGPXX (SEQ ID NO: 6441):TPT:SSLS-AA17-LFF (SEQ ID NO: 6605), AAPASXX (SEQ ID NO: 6436):VPA:SSLS-AA17-LFF (SEQ ID NO: 6605), STPPTXX (SEQ ID NO: 6452):VPT:SSLS-AA17-LFF (SEQ ID NO: 6605), HVPKPXX (SEQ ID NO: 6442)APT:SSLS-AA17-LFF (SEQ ID NO: 6605), RVPSTXX (SEQ ID NO: 6449):APV:SSLS-AA17-LFF (SEQ ID NO: 6605), ASAAPXX (SEQ ID NO: 6437):VPQ:SSLS-AA17-LFF (SEQ ID NO: 6605), ASASPXX (SEQ ID NO: 6438):VSQ:SSLS-AA17-LFF (SEQ ID NO: 6605), ASASPXX (SEQ ID NO: 6438):VPQ:SSLS-AA17-LFF (SEQ ID NO: 6605), NDEGLEX (SEQ ID NO: 6447):VPT:SSLS-AA17-LFF (SEQ ID NO: 6605), SSVKXQP (SEQ ID NO: 6451):SRV:SSLS-AA17-LFF (SEQ ID NO: 6605), RNVQXRP (SEQ ID NO: 6448):TQV:SSLS-AA17-LFF (SEQ ID NO: 6605), KIPKAXX (SEQ ID NO: 6445):APT:NAIS-AA17-LYF (SEQ ID NO: 6595), GIPEPXX (SEQ ID NO: 6440):APT:NAIS-AA17-LYF (SEQ ID NO: 6595), SIPKAXX (SEQ ID NO: 6450):APT:NAIS-AA17-LYF (SEQ ID NO: 6595), AVPKAXX (SEQ ID NO: 6439)APT:NAIS-AA17-LYF (SEQ ID NO: 6595), KVGKAXX (SEQ ID NO: 6446):APT:NAIS-AA17-LYF (SEQ ID NO: 6595), KASKAXX (SEQ ID NO: 6444):APT:NAIS-AA17-LYF (SEQ ID NO: 6595), GSAGPXX (SEQ ID NO: 6441):APT:NAIS-AA17-LYF (SEQ ID NO: 6595), AAPASXX (SEQ ID NO: 6436):APT:NAIS-AA17-LYF (SEQ ID NO: 6595), STPPTXX (SEQ ID NO: 6452):APT:NAIS-AA17-LYF (SEQ ID NO: 6595), RVPSTXX (SEQ ID NO: 6449):APT:NAIS-AA17-LYF (SEQ ID NO: 6595), ASAAPXX (SEQ ID NO: 6437)-APT:NAIS-AA17-LYF (SEQ ID NO: 6595), ASASPXX (SEQ ID NO: 6438):APT:NAIS-AA17-LYF (SEQ ID NO: 6595), KIPKAXX (SEQ ID NO: 6445):VPT:NAIS-AA17-LYF (SEQ ID NO: 6595), GIPEPXX (SEQ ID NO: 6440):VPE:NAIS-AA17-LYF (SEQ ID NO: 6595), SIPKAXX (SEQ ID NO: 6450):VPT:NAIS-AA17-LYF (SEQ ID NO: 6595), KVGKAXX (SEQ ID NO: 6446):VPT:NAIS-AA17-LYF (SEQ ID NO: 6595), KASKAXX (SEQ ID NO: 6444):VPT:NAIS-AA17-LYF (SEQ ID NO: 6595), GSAGPXX (SEQ ID NO: 6441):TPT:NAIS-AA17-LYF (SEQ ID NO: 6595), AAPASXX (SEQ ID NO: 6436):VPA:NAIS-AA17-LYF (SEQ ID NO: 6595), STPPTXX (SEQ ID NO: 6452):VPT:NAIS-AA17-LYF (SEQ ID NO: 6595), RVPSTXX (SEQ ID NO: 6449):APV:NAIS-AA17-LYF (SEQ ID NO: 6595), ASAAPXX (SEQ ID NO: 6437):VPQ:NAIS-AA17-LYF (SEQ ID NO: 6595), ASASPXX (SEQ ID NO: 6438):VSQ:NAIS-AA17-LYF (SEQ ID NO: 6595), ASASPXX (SEQ ID NO: 6438):VPQ:NAIS-AA17-LYF (SEQ ID NO: 6595), NDEGLEX (SEQ ID NO: 6447):VPT:NAIS-AA17-LYF (SEQ ID NO: 6595), SSVKXQP (SEQ ID NO: 6451):SRV:NAIS-AA17-LYF (SEQ ID NO: 6595), RNVQXRP (SEQ ID NO: 6448):TQV:NAIS-AA17-LYF (SEQ ID NO: 6595), KIPKAXX (SEQ ID NO: 6445):APT:SATS-AA17-LYY (SEQ ID NO: 6599), GIPEPXX (SEQ ID NO: 6440):APT:SATS-AA17-LYY (SEQ ID NO: 6599), SIPKAXX (SEQ ID NO: 6450):APT:SATS-AA17-LYY (SEQ ID NO: 6599), HVTKPTX (SEQ ID NO: 6443)APT:SATS-AA17-LYY (SEQ ID NO: 6599), YVPKPXX (SEQ ID NO: 6454):APT:SATS-AA17-LYY (SEQ ID NO: 6599), TVPKPXX (SEQ ID NO: 6453):APT:SATS-AA17-LYY (SEQ ID NO: 6599), KVGKAXX (SEQ ID NO: 6446):APT:SATS-AA17-LYY (SEQ ID NO: 6599), KASKAXX (SEQ ID NO: 6444):APT:SATS-AA17-LYY (SEQ ID NO: 6599), GSAGPXX (SEQ ID NO: 6441):APT:SATS-AA17-LYY (SEQ ID NO: 6599), AAPASXX (SEQ ID NO: 6436):APT:SATS-AA17-LYY (SEQ ID NO: 6599), STPPTXX (SEQ ID NO: 6452):APT:SATS-AA17-LYY (SEQ ID NO: 6599), HVPKPXX (SEQ ID NO: 6442):APT:SATS-AA17-LYY (SEQ ID NO: 6599), RVPSTXX (SEQ ID NO: 6449):APT:SATS-AA17-LYY (SEQ ID NO: 6599), ASAAPXX (SEQ ID NO: 6437):APT:SATS-AA17-LYY (SEQ ID NO: 6599), ASASPXX (SEQ ID NO: 6438):APT:SATS-AA17-LYY (SEQ ID NO: 6599), KIPKAXX (SEQ ID NO: 6445):VPT:SATS-AA17-LYY (SEQ ID NO: 6599), GIPEPXX (SEQ ID NO: 6440):VPE:SATS-AA17-LYY (SEQ ID NO: 6599), SIPKAXX (SEQ ID NO: 6450):VPT:SATS-AA17-LYY (SEQ ID NO: 6599), KVGKAXX (SEQ ID NO: 6446):VPT:SATS-AA17-LYY (SEQ ID NO: 6599), KASKAXX (SEQ ID NO: 6444):VPT:SATS-AA17-LYY (SEQ ID NO: 6599), GSAGPXX (SEQ ID NO: 6441):TPT:SATS-AA17-LYY (SEQ ID NO: 6599), AAPASXX (SEQ ID NO: 6436):VPA:SATS-AA17-LYY (SEQ ID NO: 6599), STPPTXX (SEQ ID NO: 6452):VPT:SATS-AA17-LYY (SEQ ID NO: 6599), RVPSTXX (SEQ ID NO: 6449):APV:SATS-AA17-LYY (SEQ ID NO: 6599), ASAAPXX (SEQ ID NO: 6437):VPQ:SATS-AA17-LYY (SEQ ID NO: 6599), ASASPXX (SEQ ID NO: 6438):VSQ:SATS-AA17-LYY (SEQ ID NO: 6599), ASASPXX (SEQ ID NO: 6438):VPQ:SATS-AA17-LYY (SEQ ID NO: 6599), NDEGLEX (SEQ ID NO: 6447):VPT:SATS-AA17-LYY (SEQ ID NO: 6599), SSVKXQP (SEQ ID NO: 6451):SRV:SATS-AA17-LYY (SEQ ID NO: 6599), RNVQXRP (SEQ ID NO: 6448):TQV:SATS-AA17-LYY (SEQ ID NO: 6599), KIPKAXX (SEQ ID NO: 6445):VPT:SPIS-AA17-LYK (SEQ ID NO: 6604), GIPEPXX (SEQ ID NO: 6440):VPT:SPIS-AA17-LYK (SEQ ID NO: 6604), SIPKAXX (SEQ ID NO: 6450):VPT:SPIS-AA17-LYK (SEQ ID NO: 6604), HVTKPTX (SEQ ID NO: 6443):VPT:SPIS-AA17-LYK (SEQ ID NO: 6604), YVPKPXX (SEQ ID NO: 6454):VPT:SPIS-AA17-LYK (SEQ ID NO: 6604), TVPKPXX (SEQ ID NO: 6453):VPT:SPIS-AA17-LYK (SEQ ID NO: 6604), AVPKAXX (SEQ ID NO: 6439):VPT:SPIS-AA17-LYK (SEQ ID NO: 6604), KASKAXX (SEQ ID NO: 6444):VPT:SPIS-AA17-LYK (SEQ ID NO: 6604), GSAGPXX (SEQ ID NO: 6441):VPT:SPIS-AA17-LYK (SEQ ID NO: 6604), AAPASXX (SEQ ID NO: 6436):VPT:SPIS-AA17-LYK (SEQ ID NO: 6604), STPPTXX (SEQ ID NO: 6452):VPT:SPIS-AA17-LYK (SEQ ID NO: 6604), HVPKPXX (SEQ ID NO: 6442):VPT:SPIS-AA17-LYK (SEQ ID NO: 6604), RVPSTXX (SEQ ID NO: 6449):VPT:SPIS-AA17-LYK (SEQ ID NO: 6604), ASAAPXX (SEQ ID NO: 6437):VPT:SPIS-AA17-LYK (SEQ ID NO: 6604), ASASPXX (SEQ ID NO: 6438):VPT:SPIS-AA17-LYK (SEQ ID NO: 6604), GIPEPXX (SEQ ID NO: 6440):VPE:SPIS-AA17-LYK (SEQ ID NO: 6604), HVTKPTX (SEQ ID NO: 6443):APT:SPIS-AA17-LYK (SEQ ID NO: 6604), YVPKPXX (SEQ ID NO: 6454):APT:SPIS-AA17-LYK (SEQ ID NO: 6604), TVPKPXX (SEQ ID NO: 6453):APT:SPIS-AA17-LYK (SEQ ID NO: 6604), AVPKAXX (SEQ ID NO: 6439)APT:SPIS-AA17-LYK (SEQ ID NO: 6604), GSAGPXX (SEQ ID NO: 6441):TPT:SPIS-AA17-LYK (SEQ ID NO: 6604), AAPASXX (SEQ ID NO: 6436):VPA:SPIS-AA17-LYK (SEQ ID NO: 6604), HVPKPXX (SEQ ID NO: 6442):APT:SPIS-AA17-LYK (SEQ ID NO: 6604), RVPSTXX (SEQ ID NO: 6449):APV:SPIS-AA17-LYK (SEQ ID NO: 6604), ASAAPXX (SEQ ID NO: 6437):VPQ:SPIS-AA17-LYK (SEQ ID NO: 6604), ASASPXX (SEQ ID NO: 6438):VSQ:SPIS-AA17-LYK (SEQ ID NO: 6604), ASASPXX (SEQ ID NO: 6438):VPQ:SPIS-AA17-LYK (SEQ ID NO: 6604), SSVKXQP (SEQ ID NO: 6451):SRV:SPIS-AA17-LYK (SEQ ID NO: 6604), RNVQXRP (SEQ ID NO: 6448):TQV:SPIS-AA17-LYK (SEQ ID NO: 6604), KIPKAXX (SEQ ID NO: 6445):VPT:EPIS-AA17-LYL (SEQ ID NO: 6591), GIPEPXX (SEQ ID NO: 6440):VPT:EPIS-AA17-LYL (SEQ ID NO: 6591), SIPKAXX (SEQ ID NO: 6450):VPT:EPIS-AA17-LYL (SEQ ID NO: 6591), HVTKPTX (SEQ ID NO: 6443):VPT:EPIS-AA17-LYL (SEQ ID NO: 6591), YVPKPXX (SEQ ID NO: 6454):VPT:EPIS-AA17-LYL (SEQ ID NO: 6591), TVPKPXX (SEQ ID NO: 6453):VPT:EPIS-AA17-LYL (SEQ ID NO: 6591), AVPKAXX (SEQ ID NO: 6439):VPT:EPIS-AA17-LYL (SEQ ID NO: 6591), KVGKAXX (SEQ ID NO: 6446):VPT:EPIS-AA17-LYL (SEQ ID NO: 6591), GSAGPXX (SEQ ID NO: 6441):VPT:EPIS-AA17-LYL (SEQ ID NO: 6591), AAPASXX (SEQ ID NO: 6436):VPT:EPIS-AA17-LYL (SEQ ID NO: 6591), STPPTXX (SEQ ID NO: 6452):VPT:EPIS-AA17-LYL (SEQ ID NO: 6591), HVPKPXX (SEQ ID NO: 6442):VPT:EPIS-AA17-LYL (SEQ ID NO: 6591), RVPSTXX (SEQ ID NO: 6449):VPT:EPIS-AA17-LYL (SEQ ID NO: 6591), ASAAPXX (SEQ ID NO: 6437):VPT:EPIS-AA17-LYL (SEQ ID NO: 6591), ASASPXX (SEQ ID NO: 6438):VPT:EPIS-AA17-LYL (SEQ ID NO: 6591), GIPEPXX (SEQ ID NO: 6440):VPE:EPIS-AA17-LYL (SEQ ID NO: 6591), HVTKPTX (SEQ ID NO: 6443):APT:EPIS-AA17-LYL (SEQ ID NO: 6591), YVPKPXX (SEQ ID NO: 6454):APT:EPIS-AA17-LYL (SEQ ID NO: 6591), TVPKPXX (SEQ ID NO: 6453):APT:EPIS-AA17-LYL (SEQ ID NO: 6591), AVPKAXX (SEQ ID NO: 6439):APT:EPIS-AA17-LYL (SEQ ID NO: 6591), GSAGPXX (SEQ ID NO: 6441):TPT:EPIS-AA17-LYL (SEQ ID NO: 6591), AAPASXX (SEQ ID NO: 6436):VPA:EPIS-AA17-LYL (SEQ ID NO: 6591), HVPKPXX (SEQ ID NO: 6442):APT:EPIS-AA17-LYL (SEQ ID NO: 6591), RVPSTXX (SEQ ID NO: 6449):APV:EPIS-AA17-LYL (SEQ ID NO: 6591), ASAAPXX (SEQ ID NO: 6437):VPQ:EPIS-AA17-LYL (SEQ ID NO: 6591), ASASPXX (SEQ ID NO: 6438):VSQ:EPIS-AA17-LYL (SEQ ID NO: 6591), ASASPXX (SEQ ID NO: 6438):VPQ:EPIS-AA17-LYL (SEQ ID NO: 6591), SSVKXQP (SEQ ID NO: 6451):SRV:EPIS-AA17-LYL (SEQ ID NO: 6591), RNVQXRP (SEQ ID NO: 6448):TQV:EPIS-AA17-LYL (SEQ ID NO: 6591), KIPKAXX (SEQ ID NO: 6445):TPT:SPIN-AA17-LYF (SEQ ID NO: 6601), GIPEPXX (SEQ ID NO: 6440):TPT:SPIN-AA17-LYF (SEQ ID NO: 6601), SIPKAXX (SEQ ID NO: 6450):TPT:SPIN-AA17-LYF (SEQ ID NO: 6601), HVTKPTX (SEQ ID NO: 6443):TPT:SPIN-AA17-LYF (SEQ ID NO: 6601), YVPKPXX (SEQ ID NO: 6454):TPT:SPIN-AA17-LYF (SEQ ID NO: 6601), TVPKPXX (SEQ ID NO: 6453):TPT:SPIN-AA17-LYF (SEQ ID NO: 6601), AVPKAXX (SEQ ID NO: 6439):TPT:SPIN-AA17-LYF (SEQ ID NO: 6601), KVGKAXX (SEQ ID NO: 6446):TPT:SPIN-AA17-LYF (SEQ ID NO: 6601), KASKAXX (SEQ ID NO: 6444):TPT:SPIN-AA17-LYF (SEQ ID NO: 6601), AAPASXX (SEQ ID NO: 6436):TPT:SPIN-AA17-LYF (SEQ ID NO: 6601), STPPTXX (SEQ ID NO: 6452):TPT:SPIN-AA17-LYF (SEQ ID NO: 6601), HVPKPXX (SEQ ID NO: 6442):TPT:SPIN-AA17-LYF (SEQ ID NO: 6601), RVPSTXX (SEQ ID NO: 6449):TPT:SPIN-AA17-LYF (SEQ ID NO: 6601), ASAAPXX (SEQ ID NO: 6437):TPT:SPIN-AA17-LYF (SEQ ID NO: 6601), ASASPXX (SEQ ID NO: 6438):TPT:SPIN-AA17-LYF (SEQ ID NO: 6601), KIPKAXX (SEQ ID NO: 6445):VPT:SPIN-AA17-LYF (SEQ ID NO: 6601), GIPEPXX (SEQ ID NO: 6440):VPE:SPIN-AA17-LYF (SEQ ID NO: 6601), SIPKAXX (SEQ ID NO: 6450):VPT:SPIN-AA17-LYF (SEQ ID NO: 6601), HVTKPTX (SEQ ID NO: 6443):APT:SPIN-AA17-LYF (SEQ ID NO: 6601), YVPKPXX (SEQ ID NO: 6454):APT:SPIN-AA17-LYF (SEQ ID NO: 6601), TVPKPXX (SEQ ID NO: 6453):APT:SPIN-AA17-LYF (SEQ ID NO: 6601), AVPKAXX (SEQ ID NO: 6439)APT:SPIN-AA17-LYF (SEQ ID NO: 6601), KVGKAXX (SEQ ID NO: 6446):VPT:SPIN-AA17-LYF (SEQ ID NO: 6601), KASKAXX (SEQ ID NO: 6444):VPT:SPIN-AA17-LYF (SEQ ID NO: 6601), AAPASXX (SEQ ID NO: 6436):VPA:SPIN-AA17-LYF (SEQ ID NO: 6601), STPPTXX (SEQ ID NO: 6452):VPT:SPIN-AA17-LYF (SEQ ID NO: 6601), HVPKPXX (SEQ ID NO: 6442)APT:SPIN-AA17-LYF (SEQ ID NO: 6601), RVPSTXX (SEQ ID NO: 6449)APV:SPIN-AA17-LYF (SEQ ID NO: 6601), ASAAPXX (SEQ ID NO: 6437):VPQ:SPIN-AA17-LYF (SEQ ID NO: 6601), ASASPXX (SEQ ID NO: 6438):VSQ:SPIN-AA17-LYF (SEQ ID NO: 6601), ASASPXX (SEQ ID NO: 6438):VPQ:SPIN-AA17-LYF (SEQ ID NO: 6601), NDEGLEX (SEQ ID NO: 6447):VPT:SPIN-AA17-LYF (SEQ ID NO: 6601), SSVKXQP (SEQ ID NO: 6451):SRV:SPIN-AA17-LYF (SEQ ID NO: 6601), RNVQXRP (SEQ ID NO: 6448):TQV:SPIN-AA17-LYF (SEQ ID NO: 6601), KIPKAXX (SEQ ID NO: 6445):VPA:SPIS-AA17-LYI (SEQ ID NO: 6603), GIPEPXX (SEQ ID NO: 6440):VPA:SPIS-AA17-LYI (SEQ ID NO: 6603), SIPKAXX (SEQ ID NO: 6450):VPA:SPIS-AA17-LYI (SEQ ID NO: 6603), HVTKPTX (SEQ ID NO: 6443):VPA:SPIS-AA17-LYI (SEQ ID NO: 6603), YVPKPXX (SEQ ID NO: 6454):VPA:SPIS-AA17-LYI (SEQ ID NO: 6603), TVPKPXX (SEQ ID NO: 6453):VPA:SPIS-AA17-LYI (SEQ ID NO: 6603), AVPKAXX (SEQ ID NO: 6439):VPA:SPIS-AA17-LYI (SEQ ID NO: 6603), KVGKAXX (SEQ ID NO: 6446):VPA:SPIS-AA17-LYI (SEQ ID NO: 6603), KASKAXX (SEQ ID NO: 6444):VPA:SPIS-AA17-LYI (SEQ ID NO: 6603), GSAGPXX (SEQ ID NO: 6441):VPA:SPIS-AA17-LYI (SEQ ID NO: 6603), STPPTXX (SEQ ID NO: 6452):VPA:SPIS-AA17-LYI (SEQ ID NO: 6603), HVPKPXX (SEQ ID NO: 6442):VPA:SPIS-AA17-LYI (SEQ ID NO: 6603), RVPSTXX (SEQ ID NO: 6449):VPA:SPIS-AA17-LYI (SEQ ID NO: 6603), ASAAPXX (SEQ ID NO: 6437):VPA:SPIS-AA17-LYI (SEQ ID NO: 6603), ASASPXX (SEQ ID NO: 6438):VPA:SPIS-AA17-LYI (SEQ ID NO: 6603), KIPKAXX (SEQ ID NO: 6445):VPT:SPIS-AA17-LYI (SEQ ID NO: 6603), GIPEPXX (SEQ ID NO: 6440):VPE:SPIS-AA17-LYI (SEQ ID NO: 6603), SIPKAXX (SEQ ID NO: 6450):VPT:SPIS-AA17-LYI (SEQ ID NO: 6603), HVTKPTX (SEQ ID NO: 6443):APT:SPIS-AA17-LYI (SEQ ID NO: 6603), YVPKPXX (SEQ ID NO: 6454):APT:SPIS-AA17-LYI (SEQ ID NO: 6603), TVPKPXX (SEQ ID NO: 6453):APT:SPIS-AA17-LYI (SEQ ID NO: 6603), AVPKAXX (SEQ ID NO: 6439):APT:SPIS-AA17-LYI (SEQ ID NO: 6603), KVGKAXX (SEQ ID NO: 6446):VPT:SPIS-AA17-LYI (SEQ ID NO: 6603), KASKAXX (SEQ ID NO: 6444):VPT:SPIS-AA17-LYI (SEQ ID NO: 6603), GSAGPXX (SEQ ID NO: 6441):TPT:SPIS-AA17-LYI (SEQ ID NO: 6603), STPPTXX (SEQ ID NO: 6452):VPT:SPIS-AA17-LYI (SEQ ID NO: 6603), HVPKPXX (SEQ ID NO: 6442):APT:SPIS-AA17-LYI (SEQ ID NO: 6603), RVPSTXX (SEQ ID NO: 6449):APV:SPIS-AA17-LYI (SEQ ID NO: 6603), ASAAPXX (SEQ ID NO: 6437):VPQ:SPIS-AA17-LYI (SEQ ID NO: 6603), ASASPXX (SEQ ID NO: 6438):VSQ:SPIS-AA17-LYI (SEQ ID NO: 6603), ASASPXX (SEQ ID NO: 6438):VPQ:SPIS-AA17-LYI (SEQ ID NO: 6603), NDEGLEX (SEQ ID NO: 6447):VPT:SPIS-AA17-LYI (SEQ ID NO: 6603), SSVKXQP (SEQ ID NO: 6451):SRV:SPIS-AA17-LYI (SEQ ID NO: 6603), RNVQXRP (SEQ ID NO: 6448):TQV:SPIS-AA17-LYI (SEQ ID NO: 6603), KIPKAXX (SEQ ID NO: 6445):VPT:SPIS-AA17-LFI (SEQ ID NO: 6602), GIPEPXX (SEQ ID NO: 6440):VPT:SPIS-AA17-LFI (SEQ ID NO: 6602), SIPKAXX (SEQ ID NO: 6450):VPT:SPIS-AA17-LFI (SEQ ID NO: 6602), HVTKPTX (SEQ ID NO: 6443):VPT:SPIS-AA17-LFI (SEQ ID NO: 6602), YVPKPXX (SEQ ID NO: 6454):VPT:SPIS-AA17-LFI (SEQ ID NO: 6602), TVPKPXX (SEQ ID NO: 6453):VPT:SPIS-AA17-LFI (SEQ ID NO: 6602), AVPKAXX (SEQ ID NO: 6439):VPT:SPIS-AA17-LFI (SEQ ID NO: 6602), KVGKAXX (SEQ ID NO: 6446):VPT:SPIS-AA17-LFI (SEQ ID NO: 6602), KASKAXX (SEQ ID NO: 6444):VPT:SPIS-AA17-LFI (SEQ ID NO: 6602), GSAGPXX (SEQ ID NO: 6441):VPT:SPIS-AA17-LFI (SEQ ID NO: 6602), AAPASXX (SEQ ID NO: 6436):VPT:SPIS-AA17-LFI (SEQ ID NO: 6602), HVPKPXX (SEQ ID NO: 6442):VPT:SPIS-AA17-LFI (SEQ ID NO: 6602), RVPSTXX (SEQ ID NO: 6449):VPT:SPIS-AA17-LFI (SEQ ID NO: 6602), ASAAPXX (SEQ ID NO: 6437):VPT:SPIS-AA17-LFI (SEQ ID NO: 6602), ASASPXX (SEQ ID NO: 6438):VPT:SPIS-AA17-LFI (SEQ ID NO: 6602), GIPEPXX (SEQ ID NO: 6440):VPE:SPIS-AA17-LFI (SEQ ID NO: 6602), HVTKPTX (SEQ ID NO: 6443):APT:SPIS-AA17-LFI (SEQ ID NO: 6602), YVPKPXX (SEQ ID NO: 6454):APT:SPIS-AA17-LFI (SEQ ID NO: 6602), TVPKPXX (SEQ ID NO: 6453):APT:SPIS-AA17-LFI (SEQ ID NO: 6602), AVPKAXX (SEQ ID NO: 6439):APT:SPIS-AA17-LFI (SEQ ID NO: 6602), GSAGPXX (SEQ ID NO: 6441):TPT:SPIS-AA17-LFI (SEQ ID NO: 6602), AAPASXX (SEQ ID NO: 6436):VPA:SPIS-AA17-LFI (SEQ ID NO: 6602), HVPKPXX (SEQ ID NO: 6442):APT:SPIS-AA17-LFI (SEQ ID NO: 6602), RVPSTXX (SEQ ID NO: 6449):APV:SPIS-AA17-LFI (SEQ ID NO: 6602), ASAAPXX (SEQ ID NO: 6437):VPQ:SPIS-AA17-LFI (SEQ ID NO: 6602), ASASPXX (SEQ ID NO: 6438):VSQ:SPIS-AA17-LFI (SEQ ID NO: 6602), ASASPXX (SEQ ID NO: 6438):VPQ:SPIS-AA17-LFI (SEQ ID NO: 6602), SSVKXQP (SEQ ID NO: 6451):SRV:SPIS-AA17-LFI (SEQ ID NO: 6602), RNVQXRP (SEQ ID NO: 6448):TQV:SPIS-AA17-LFI (SEQ ID NO: 6602), KIPKAXX (SEQ ID NO: 6445):APV:KPLS-AA17-LYV (SEQ ID NO: 6594), GIPEPXX (SEQ ID NO: 6440):APV:KPLS-AA17-LYV (SEQ ID NO: 6594), SIPKAXX (SEQ ID NO: 6450):APV:KPLS-AA17-LYV (SEQ ID NO: 6594), HVTKPTX (SEQ ID NO: 6443):APV:KPLS-AA17-LYV (SEQ ID NO: 6594), YVPKPXX (SEQ ID NO: 6454):APV:KPLS-AA17-LYV (SEQ ID NO: 6594), TVPKPXX (SEQ ID NO: 6453):APV:KPLS-AA17-LYV (SEQ ID NO: 6594), AVPKAXX (SEQ ID NO: 6439):APV:KPLS-AA17-LYV (SEQ ID NO: 6594), KVGKAXX (SEQ ID NO: 6446):APV:KPLS-AA17-LYV (SEQ ID NO: 6594), KASKAXX (SEQ ID NO: 6444):APV:KPLS-AA17-LYV (SEQ ID NO: 6594), GSAGPXX (SEQ ID NO: 6441)APV:KPLS-AA17-LYV (SEQ ID NO: 6594), AAPASXX (SEQ ID NO: 6436):APV:KPLS-AA17-LYV (SEQ ID NO: 6594), STPPTXX (SEQ ID NO: 6452):APV:KPLS-AA17-LYV (SEQ ID NO: 6594), HVPKPXX (SEQ ID NO: 6442):APV:KPLS-AA17-LYV (SEQ ID NO: 6594), ASAAPXX (SEQ ID NO: 6437):APV:KPLS-AA17-LYV (SEQ ID NO: 6594), ASASPXX (SEQ ID NO: 6438):APV:KPLS-AA17-LYV (SEQ ID NO: 6594), KIPKAXX (SEQ ID NO: 6445):VPT:KPLS-AA17-LYV (SEQ ID NO: 6594), GIPEPXX (SEQ ID NO: 6440):VPE:KPLS-AA17-LYV (SEQ ID NO: 6594), SIPKAXX (SEQ ID NO: 6450):VPT:KPLS-AA17-LYV (SEQ ID NO: 6594), HVTKPTX (SEQ ID NO: 6443):APT:KPLS-AA17-LYV (SEQ ID NO: 6594), YVPKPXX (SEQ ID NO: 6454):APT:KPLS-AA17-LYV (SEQ ID NO: 6594), TVPKPXX (SEQ ID NO: 6453):APT:KPLS-AA17-LYV (SEQ ID NO: 6594), AVPKAXX (SEQ ID NO: 6439):APT:KPLS-AA17-LYV (SEQ ID NO: 6594), KVGKAXX (SEQ ID NO: 6446):VPT:KPLS-AA17-LYV (SEQ ID NO: 6594), KASKAXX (SEQ ID NO: 6444):VPT:KPLS-AA17-LYV (SEQ ID NO: 6594), GSAGPXX (SEQ ID NO: 6441):TPT:KPLS-AA17-LYV (SEQ ID NO: 6594), AAPASXX (SEQ ID NO: 6436):VPA:KPLS-AA17-LYV (SEQ ID NO: 6594), STPPTXX (SEQ ID NO: 6452):VPT:KPLS-AA17-LYV (SEQ ID NO: 6594), HVPKPXX (SEQ ID NO: 6442):APT:KPLS-AA17-LYV (SEQ ID NO: 6594), ASAAPXX (SEQ ID NO: 6437):VPQ:KPLS-AA17-LYV (SEQ ID NO: 6594), ASASPXX (SEQ ID NO: 6438):VSQ:KPLS-AA17-LYV (SEQ ID NO: 6594), ASASPXX (SEQ ID NO: 6438):VPQ:KPLS-AA17-LYV (SEQ ID NO: 6594), NDEGLEX (SEQ ID NO: 6447):VPT:KPLS-AA17-LYV (SEQ ID NO: 6594), SSVKXQP (SEQ ID NO: 6451):SRV:KPLS-AA17-LYV (SEQ ID NO: 6594), RNVQXRP (SEQ ID NO: 6448):TQV:KPLS-AA17-LYV (SEQ ID NO: 6594), KIPKAXX (SEQ ID NO: 6445):VPQ:EPLP-AA17-VYY (SEQ ID NO: 6592), GIPEPXX (SEQ ID NO: 6440):VPQ:EPLP-AA17-VYY (SEQ ID NO: 6592), SIPKAXX (SEQ ID NO: 6450):VPQ:EPLP-AA17-VYY (SEQ ID NO: 6592), HVTKPTX (SEQ ID NO: 6443):VPQ:EPLP-AA17-VYY (SEQ ID NO: 6592), YVPKPXX (SEQ ID NO: 6454):VPQ:EPLP-AA17-VYY (SEQ ID NO: 6592), TVPKPXX (SEQ ID NO: 6453):VPQ:EPLP-AA17-VYY (SEQ ID NO: 6592), AVPKAXX (SEQ ID NO: 6439):VPQ:EPLP-AA17-VYY (SEQ ID NO: 6592), KVGKAXX (SEQ ID NO: 6446):VPQ:EPLP-AA17-VYY (SEQ ID NO: 6592), KASKAXX (SEQ ID NO: 6444):VPQ:EPLP-AA17-VYY (SEQ ID NO: 6592), GSAGPXX (SEQ ID NO: 6441):VPQ:EPLP-AA17-VYY (SEQ ID NO: 6592), AAPASXX (SEQ ID NO: 6436):VPQ:EPLP-AA17-VYY (SEQ ID NO: 6592), STPPTXX (SEQ ID NO: 6452):VPQ:EPLP-AA17-VYY (SEQ ID NO: 6592), HVPKPXX (SEQ ID NO: 6442):VPQ:EPLP-AA17-VYY (SEQ ID NO: 6592), RVPSTXX (SEQ ID NO: 6449):VPQ:EPLP-AA17-VYY (SEQ ID NO: 6592), ASASPXX (SEQ ID NO: 6438):VPQ:EPLP-AA17-VYY (SEQ ID NO: 6592), KIPKAXX (SEQ ID NO: 6445):VPT:EPLP-AA17-VYY (SEQ ID NO: 6592), GIPEPXX (SEQ ID NO: 6440):VPE:EPLP-AA17-VYY (SEQ ID NO: 6592), SIPKAXX (SEQ ID NO: 6450):VPT:EPLP-AA17-VYY (SEQ ID NO: 6592), HVTKPTX (SEQ ID NO: 6443):APT:EPLP-AA17-VYY (SEQ ID NO: 6592), YVPKPXX (SEQ ID NO: 6454):APT:EPLP-AA17-VYY (SEQ ID NO: 6592), TVPKPXX (SEQ ID NO: 6453):APT:EPLP-AA17-VYY (SEQ ID NO: 6592), AVPKAXX (SEQ ID NO: 6439):APT:EPLP-AA17-VYY (SEQ ID NO: 6592), KVGKAXX (SEQ ID NO: 6446):VPT:EPLP-AA17-VYY (SEQ ID NO: 6592), KASKAXX (SEQ ID NO: 6444):VPT:EPLP-AA17-VYY (SEQ ID NO: 6592), GSAGPXX (SEQ ID NO: 6441):TPT:EPLP-AA17-VYY (SEQ ID NO: 6592), AAPASXX (SEQ ID NO: 6436):VPA:EPLP-AA17-VYY (SEQ ID NO: 6592), STPPTXX (SEQ ID NO: 6452):VPT:EPLP-AA17-VYY (SEQ ID NO: 6592), HVPKPXX (SEQ ID NO: 6442):APT:EPLP-AA17-VYY (SEQ ID NO: 6592), RVPSTXX (SEQ ID NO: 6449):APV:EPLP-AA17-VYY (SEQ ID NO: 6592), ASASPXX (SEQ ID NO: 6438):VSQ:EPLP-AA17-VYY (SEQ ID NO: 6592), NDEGLEX (SEQ ID NO: 6447):VPT:EPLP-AA17-VYY (SEQ ID NO: 6592), SSVKXQP (SEQ ID NO: 6451):SRV:EPLP-AA17-VYY (SEQ ID NO: 6592), RNVQXRP (SEQ ID NO: 6448):TQV:EPLP-AA17-VYY (SEQ ID NO: 6592), KIPKAXX (SEQ ID NO: 6445):VSQ:EPLT-AA17-LYY (SEQ ID NO: 6593), GIPEPXX (SEQ ID NO: 6440):VSQ:EPLT-AA17-LYY (SEQ ID NO: 6593), SIPKAXX (SEQ ID NO: 6450):VSQ:EPLT-AA17-LYY (SEQ ID NO: 6593), HVTKPTX (SEQ ID NO: 6443):VSQ:EPLT-AA17-LYY (SEQ ID NO: 6593), YVPKPXX (SEQ ID NO: 6454):VSQ:EPLT-AA17-LYY (SEQ ID NO: 6593), TVPKPXX (SEQ ID NO: 6453):VSQ:EPLT-AA17-LYY (SEQ ID NO: 6593), AVPKAXX (SEQ ID NO: 6439):VSQ:EPLT-AA17-LYY (SEQ ID NO: 6593), KVGKAXX (SEQ ID NO: 6446):VSQ:EPLT-AA17-LYY (SEQ ID NO: 6593), KASKAXX (SEQ ID NO: 6444):VSQ:EPLT-AA17-LYY (SEQ ID NO: 6593), GSAGPXX (SEQ ID NO: 6441):VSQ:EPLT-AA17-LYY (SEQ ID NO: 6593), AAPASXX (SEQ ID NO: 6436):VSQ:EPLT-AA17-LYY (SEQ ID NO: 6593), STPPTXX (SEQ ID NO: 6452):VSQ:EPLT-AA17-LYY (SEQ ID NO: 6593), HVPKPXX (SEQ ID NO: 6442):VSQ:EPLT-AA17-LYY (SEQ ID NO: 6593), RVPSTXX (SEQ ID NO: 6449):VSQ:EPLT-AA17-LYY (SEQ ID NO: 6593), ASAAPXX (SEQ ID NO: 6437):VSQ:EPLT-AA17-LYY (SEQ ID NO: 6593), ASASPXX (SEQ ID NO: 6438):VSQ:EPLT-AA17-LYY (SEQ ID NO: 6593), KIPKAXX (SEQ ID NO: 6445):VPT:EPLT-AA17-LYY (SEQ ID NO: 6593), GIPEPXX (SEQ ID NO: 6440):VPE:EPLT-AA17-LYY (SEQ ID NO: 6593), SIPKAXX (SEQ ID NO: 6450):VPT:EPLT-AA17-LYY (SEQ ID NO: 6593), HVTKPTX (SEQ ID NO: 6443):APT:EPLT-AA17-LYY (SEQ ID NO: 6593), YVPKPXX (SEQ ID NO: 6454):APT:EPLT-AA17-LYY (SEQ ID NO: 6593), TVPKPXX (SEQ ID NO: 6453):APT:EPLT-AA17-LYY (SEQ ID NO: 6593), AVPKAXX (SEQ ID NO: 6439):APT:EPLT-AA17-LYY (SEQ ID NO: 6593), KVGKAXX (SEQ ID NO: 6446):VPT:EPLT-AA17-LYY (SEQ ID NO: 6593), KASKAXX (SEQ ID NO: 6444):VPT:EPLT-AA17-LYY (SEQ ID NO: 6593), GSAGPXX (SEQ ID NO: 6441):TPT:EPLT-AA17-LYY (SEQ ID NO: 6593), AAPASXX (SEQ ID NO: 6436):VPA:EPLT-AA17-LYY (SEQ ID NO: 6593), STPPTXX (SEQ ID NO: 6452):VPT:EPLT-AA17-LYY (SEQ ID NO: 6593), HVPKPXX (SEQ ID NO: 6442):APT:EPLT-AA17-LYY (SEQ ID NO: 6593), RVPSTXX (SEQ ID NO: 6449):APV:EPLT-AA17-LYY (SEQ ID NO: 6593), ASAAPXX (SEQ ID NO: 6437):VPQ:EPLT-AA17-LYY (SEQ ID NO: 6593), NDEGLEX (SEQ ID NO: 6447):VPT:EPLT-AA17-LYY (SEQ ID NO: 6593), SSVKXQP (SEQ ID NO: 6451):SRV:EPLT-AA17-LYY (SEQ ID NO: 6593), RNVQXRP (SEQ ID NO: 6448):TQV:EPLT-AA17-LYY (SEQ ID NO: 6593), KIPKAXX (SEQ ID NO: 6445):VPQ:EPLT-AA17-LYY (SEQ ID NO: 6593), GIPEPXX (SEQ ID NO: 6440):VPQ:EPLT-AA17-LYY (SEQ ID NO: 6593), SIPKAXX (SEQ ID NO: 6450):VPQ:EPLT-AA17-LYY (SEQ ID NO: 6593), HVTKPTX (SEQ ID NO: 6443):VPQ:EPLT-AA17-LYY (SEQ ID NO: 6593), YVPKPXX (SEQ ID NO: 6454):VPQ:EPLT-AA17-LYY (SEQ ID NO: 6593), TVPKPXX (SEQ ID NO: 6453):VPQ:EPLT-AA17-LYY (SEQ ID NO: 6593), AVPKAXX (SEQ ID NO: 6439):VPQ:EPLT-AA17-LYY (SEQ ID NO: 6593), KVGKAXX (SEQ ID NO: 6446):VPQ:EPLT-AA17-LYY (SEQ ID NO: 6593), KASKAXX (SEQ ID NO: 6444):VPQ:EPLT-AA17-LYY (SEQ ID NO: 6593), GSAGPXX (SEQ ID NO: 6441):VPQ:EPLT-AA17-LYY (SEQ ID NO: 6593), AAPASXX (SEQ ID NO: 6436):VPQ:EPLT-AA17-LYY (SEQ ID NO: 6593), STPPTXX (SEQ ID NO: 6452):VPQ:EPLT-AA17-LYY (SEQ ID NO: 6593), HVPKPXX (SEQ ID NO: 6442):VPQ:EPLT-AA17-LYY (SEQ ID NO: 6593), RVPSTXX (SEQ ID NO: 6449):VPQ:EPLT-AA17-LYY (SEQ ID NO: 6593), ASASPXX (SEQ ID NO: 6438):VPQ:EPLT-AA17-LYY (SEQ ID NO: 6593), NDEGLEX (SEQ ID NO: 6447):VPT:SNIT-AA17-QIM (SEQ ID NO: 6600), GIPEPXX (SEQ ID NO: 6440):VPE:SNIT-AA17-QIM (SEQ ID NO: 6600), HVTKPTX (SEQ ID NO: 6443)APT:SNIT-AA17-QIM (SEQ ID NO: 6600), YVPKPXX (SEQ ID NO: 6454):APT:SNIT-AA17-QIM (SEQ ID NO: 6600), TVPKPXX (SEQ ID NO: 6453):APT:SNIT-AA17-QIM (SEQ ID NO: 6600), AVPKAXX (SEQ ID NO: 6439):APT:SNIT-AA17-QIM (SEQ ID NO: 6600), GSAGPXX (SEQ ID NO: 6441):TPT:SNIT-AA17-QIM (SEQ ID NO: 6600), AAPASXX (SEQ ID NO: 6436):VPA:SNIT-AA17-QIM (SEQ ID NO: 6600), HVPKPXX (SEQ ID NO: 6442):APT:SNIT-AA17-QIM (SEQ ID NO: 6600), RVPSTXX (SEQ ID NO: 6449):APV:SNIT-AA17-QIM (SEQ ID NO: 6600), ASAAPXX (SEQ ID NO: 6437):VPQ:SNIT-AA17-QIM (SEQ ID NO: 6600), ASASPXX (SEQ ID NO: 6438):VSQ:SNIT-AA17-QIM (SEQ ID NO: 6600), ASASPXX (SEQ ID NO: 6438):VPQ:SNIT-AA17-QIM (SEQ ID NO: 6600), SSVKXQP (SEQ ID NO: 6451):SRV:SNIT-AA17-QIM (SEQ ID NO: 6600), RNVQXRP (SEQ ID NO: 6448):TQV:SNIT-AA17-QIM (SEQ ID NO: 6600), RNVQXRP (SEQ ID NO: 6448):SRV:RSVK-AA17-AKV (SEQ ID NO: 6597), KIPKAXX (SEQ ID NO: 6445):VPT:RSVK-AA17-AKV (SEQ ID NO: 6597), GIPEPXX (SEQ ID NO: 6440):VPE:RSVK-AA17-AKV (SEQ ID NO: 6597), SIPKAXX (SEQ ID NO: 6450):VPT:RSVK-AA17-AKV (SEQ ID NO: 6597), HVTKPTX (SEQ ID NO: 6443):APT:RSVK-AA17-AKV (SEQ ID NO: 6597), YVPKPXX (SEQ ID NO: 6454):APT:RSVK-AA17-AKV (SEQ ID NO: 6597), TVPKPXX (SEQ ID NO: 6453):APT:RSVK-AA17-AKV (SEQ ID NO: 6597), AVPKAXX (SEQ ID NO: 6439):APT:RSVK-AA17-AKV (SEQ ID NO: 6597), KVGKAXX (SEQ ID NO: 6446):VPT:RSVK-AA17-AKV (SEQ ID NO: 6597), KASKAXX (SEQ ID NO: 6444):VPT:RSVK-AA17-AKV (SEQ ID NO: 6597), GSAGPXX (SEQ ID NO: 6441):TPT:RSVK-AA17-AKV (SEQ ID NO: 6597), AAPASXX (SEQ ID NO: 6436):VPA:RSVK-AA17-AKV (SEQ ID NO: 6597), STPPTXX (SEQ ID NO: 6452):VPT:RSVK-AA17-AKV (SEQ ID NO: 6597), HVPKPXX (SEQ ID NO: 6442):APT:RSVK-AA17-AKV (SEQ ID NO: 6597), RVPSTXX (SEQ ID NO: 6449):APV:RSVK-AA17-AKV (SEQ ID NO: 6597), ASAAPXX (SEQ ID NO: 6437):VPQ:RSVK-AA17-AKV (SEQ ID NO: 6597), ASASPXX (SEQ ID NO: 6438):VSQ:RSVK-AA17-AKV (SEQ ID NO: 6597), ASASPXX (SEQ ID NO: 6438):VPQ:RSVK-AA17-AKV (SEQ ID NO: 6597), NDEGLEX (SEQ ID NO: 6447):VPT:RSVK-AA17-AKV (SEQ ID NO: 6597), RNVQXRP (SEQ ID NO: 6448):TQV:RSVK-AA17-AKV (SEQ ID NO: 6597), SSVKXQP (SEQ ID NO: 6451):TQV:RPVQ-AA17-RKI (SEQ ID NO: 6596), KIPKAXX (SEQ ID NO: 6445):VPT:RPVQ-AA17-RKI (SEQ ID NO: 6596), GIPEPXX (SEQ ID NO: 6440):VPE:RPVQ-AA17-RKI (SEQ ID NO: 6596), SIPKAXX (SEQ ID NO: 6450):VPT:RPVQ-AA17-RKI (SEQ ID NO: 6596), HVTKPTX (SEQ ID NO: 6443):APT:RPVQ-AA17-RKI (SEQ ID NO: 6596), YVPKPXX (SEQ ID NO: 6454):APT:RPVQ-AA17-RKI (SEQ ID NO: 6596), TVPKPXX (SEQ ID NO: 6453):APT:RPVQ-AA17-RKI (SEQ ID NO: 6596), AVPKAXX (SEQ ID NO: 6439):APT:RPVQ-AA17-RKI (SEQ ID NO: 6596), KVGKAXX (SEQ ID NO: 6446):VPT:RPVQ-AA17-RKI (SEQ ID NO: 6596), KASKAXX (SEQ ID NO: 6444):VPT:RPVQ-AA17-RKI (SEQ ID NO: 6596), GSAGPXX (SEQ ID NO: 6441):TPT:RPVQ-AA17-RKI (SEQ ID NO: 6596), AAPASXX (SEQ ID NO: 6436):VPA:RPVQ-AA17-RKI (SEQ ID NO: 6596), STPPTXX (SEQ ID NO: 6452):VPT:RPVQ-AA17-RKI (SEQ ID NO: 6596), HVPKPXX (SEQ ID NO: 6442):APT:RPVQ-AA17-RKI (SEQ ID NO: 6596), RVPSTXX (SEQ ID NO: 6449):APV:RPVQ-AA17-RKI (SEQ ID NO: 6596), ASAAPXX (SEQ ID NO: 6437):VPQ:RPVQ-AA17-RKI (SEQ ID NO: 6596), ASASPXX (SEQ ID NO: 6438):VSQ:RPVQ-AA17-RKI (SEQ ID NO: 6596), ASASPXX (SEQ ID NO: 6438):VPQ:RPVQ-AA17-RKI (SEQ ID NO: 6596), NDEGLEX (SEQ ID NO: 6447):VPT:RPVQ-AA17-RKI (SEQ ID NO: 6596) and SSVKXQP (SEQ ID NO: 6451):SRV:RPVQ-AA17-RKI (SEQ ID NO: 6596); and wherein AA¹⁷ is selected from the group consisting of G, A, V, L, I, P, F, M, W, T and S (in particular is selected from the group consisting of M, I, L, V and T).

[0314] In certain embodiments, the triplet PEP7:PEP5:PEP1 is selected from the group consisting of GIPEPXX (SEQ ID NO: 6440):VPTKM (SEQ ID NO: 6424):SAIS (SEQ ID NO: 6360), HVTKPTX (SEQ ID NO: 6443):VPTKL (SEQ ID NO: 6423):SAIS (SEQ ID NO: 6360), YVPKPXX (SEQ ID NO: 6454):VPTKL (SEQ ID NO: 6423):SAIS (SEQ ID NO: 6360), TVPKPXX (SEQ ID NO: 6453):VPTQL (SEQ ID NO: 6426):SAIS (SEQ ID NO: 6360), AVPKAXX (SEQ ID NO: 6439):VPTKL (SEQ ID NO: 6423):SAIS (SEQ ID NO: 6360), KVGKAXX (SEQ ID NO: 6446):VPTKL (SEQ ID NO: 6423):SAIS (SEQ ID NO: 6360), KASKAXX (SEQ ID NO: 6444):VPTKL (SEQ ID NO: 6423):SAIS (SEQ ID NO: 6360), GSAGPXX (SEQ ID NO: 6441):VPTKM (SEQ ID NO: 6424):SAIS (SEQ ID NO: 6360), AAPASXX (SEQ ID NO: 6436):VPTRL (SEQ ID NO: 6427):SAIS (SEQ ID NO: 6360), STPPTXX (SEQ ID NO: 6452):VPTRL (SEQ ID NO: 6427):SAIS (SEQ ID NO: 6360), HVPKPXX (SEQ ID NO: 6442):VPTKL (SEQ ID NO: 6423):SAIS (SEQ ID NO: 6360), RVPSTXX (SEQ ID NO: 6449):VPTKT (SEQ ID NO: 6425):SAIS (SEQ ID NO: 6360), ASAAPXX (SEQ ID NO: 6437):VPTAL (SEQ ID NO: 6418):SAIS (SEQ ID NO: 6360), ASASPXX (SEQ ID NO: 6438):VPTDL (SEQ ID NO: 6419):SAIS (SEQ ID NO: 6360), GIPEPXX (SEQ ID NO: 6440):VPEKM (SEQ ID NO: 6406):SAIS (SEQ ID NO: 6360), HVTKPTX (SEQ ID NO: 6443):APTKL (SEQ ID NO: 6369):SAIS (SEQ ID NO: 6360), YVPKPXX (SEQ ID NO: 6454):APTKL (SEQ ID NO: 6369):SAIS (SEQ ID NO: 6360), TVPKPXX (SEQ ID NO: 6453):APTQL (SEQ ID NO: 6372):SAIS (SEQ ID NO: 6360), AVPKAXX (SEQ ID NO: 6439):APTKL (SEQ ID NO: 6369):SAIS (SEQ ID NO: 6360), GSAGPXX (SEQ ID NO: 6441):TPTKM (SEQ ID NO: 6388):SAIS (SEQ ID NO: 6360), AAPASXX (SEQ ID NO: 6436):VPARL (SEQ ID NO: 6401):SAIS (SEQ ID NO: 6360), HVPKPXX (SEQ ID NO: 6442):APTKL (SEQ ID NO: 6369):SAIS (SEQ ID NO: 6360), RVPSTXX (SEQ ID NO: 6449):APVKT (SEQ ID NO: 6379):SAIS (SEQ ID NO: 6360), ASAAPXX (SEQ ID NO: 6437):VPQAL (SEQ ID NO: 6410):SAIS (SEQ ID NO: 6360), ASASPXX (SEQ ID NO: 6438):VSODL (SEQ ID NO: 6429):SAIS (SEQ ID NO: 6360), ASASPXX (SEQ ID NO: 6438):VPQDL (SEQ ID NO: 6411):SAIS (SEQ ID NO: 6360), SSVKXQP (SEQ ID NO: 6451):SRVHH (SEQ ID NO: 6382):SAIS (SEQ ID NO: 6360), RNVQXRP (SEQ ID NO: 6448):TQVQL (SEQ ID NO: 6393):SAIS (SEQ ID NO: 6360), KIPKAXX (SEQ ID NO: 6445):VPEEL (SEQ ID NO: 6404):SSLS (SEQ ID NO: 6365), SIPKAXX (SEQ ID NO: 6450):VPEEL (SEQ ID NO: 6404):SSLS (SEQ ID NO: 6365), HVTKPTX (SEQ ID NO: 6443):VPEKL (SEQ ID NO: 6405):SSLS (SEQ ID NO: 6365), YVPKPXX (SEQ ID NO: 6454):VPEKL (SEQ ID NO: 6405):SSLS (SEQ ID NO: 6365), TVPKPXX (SEQ ID NO: 6453):VPEQL (SEQ ID NO: 6408):SSLS (SEQ ID NO: 6365), AVPKAXX (SEQ ID NO: 6439):VPEKL (SEQ ID NO: 6405):SSLS (SEQ ID NO: 6365), KVGKAXX (SEQ ID NO: 6446):VPEKL (SEQ ID NO: 6405):SSLS (SEQ ID NO: 6365), KASKAXX (SEQ ID NO: 6444):VPEKL (SEQ ID NO: 6405):SSLS (SEQ ID NO: 6365), GSAGPXX (SEQ ID NO: 6441):VPEKM (SEQ ID NO: 6406):SSLS (SEQ ID NO: 6365), AAPASXX (SEQ ID NO: 6436):VPERL (SEQ ID NO: 6409):SSLS (SEQ ID NO: 6365), STPPTXX (SEQ ID NO: 6452):VPERL (SEQ ID NO: 6409):SSLS (SEQ ID NO: 6365), HVPKPXX (SEQ ID NO: 6442):VPEKL (SEQ ID NO: 6405):SSLS (SEQ ID NO: 6365), RVPSTXX (SEQ ID NO: 6449):VPEKT (SEQ ID NO: 6407):SSLS (SEQ ID NO: 6365), ASAAPXX (SEQ ID NO: 6437):VPEAL (SEQ ID NO: 6402):SSLS (SEQ ID NO: 6365), ASASPXX (SEQ ID NO: 6438):VPEDL (SEQ ID NO: 6403):SSLS (SEQ ID NO: 6365), KIPKAXX (SEQ ID NO: 6445):VPTEL (SEQ ID NO: 6421):SSLS (SEQ ID NO: 6365), SIPKAXX (SEQ ID NO: 6450):VPTEL (SEQ ID NO: 6421):SSLS (SEQ ID NO: 6365), HVTKPTX (SEQ ID NO: 6443):APTKL (SEQ ID NO: 6369):SSLS (SEQ ID NO: 6365), YVPKPXX (SEQ ID NO: 6454):APTKL (SEQ ID NO: 6369):SSLS (SEQ ID NO: 6365), TVPKPXX (SEQ ID NO: 6453)APTQL (SEQ ID NO: 6372):SSLS (SEQ ID NO: 6365), AVPKAXX (SEQ ID NO: 6439):APTKL (SEQ ID NO: 6369):SSLS (SEQ ID NO: 6365), KVGKAXX (SEQ ID NO: 6446):VPTKL (SEQ ID NO: 6423):SSLS (SEQ ID NO: 6365), KASKAXX (SEQ ID NO: 6444):VPTKL (SEQ ID NO: 6423):SSLS (SEQ ID NO: 6365), GSAGPXX (SEQ ID NO: 6441):TPTKM (SEQ ID NO: 6388):SSLS (SEQ ID NO: 6365), AAPASXX (SEQ ID NO: 6436):VPARL (SEQ ID NO: 6401):SSLS (SEQ ID NO: 6365), STPPTXX (SEQ ID NO: 6452):VPTRL (SEQ ID NO: 6427):SSLS (SEQ ID NO: 6365), HVPKPXX (SEQ ID NO: 6442):APTKL (SEQ ID NO: 6369):SSLS (SEQ ID NO: 6365), RVPSTXX (SEQ ID NO: 6449):APVKT (SEQ ID NO: 6379):SSLS (SEQ ID NO: 6365), ASAAPXX (SEQ ID NO: 6437):VPQAL (SEQ ID NO: 6410):SSLS (SEQ ID NO: 6365), ASASPXX (SEQ ID NO: 6438):VSODL (SEQ ID NO: 6429):SSLS (SEQ ID NO: 6365), ASASPXX (SEQ ID NO: 6438):VPQDL (SEQ ID NO: 6411):SSLS (SEQ ID NO: 6365), NDEGLEX (SEQ ID NO: 6447):VPTEE (SEQ ID NO: 6420):SSLS (SEQ ID NO: 6365), NDEGLEX (SEQ ID NO: 6447):VPTGQ (SEQ ID NO: 6422):SSLS (SEQ ID NO: 6365), SSVKXQP (SEQ ID NO: 6451):SRVHH (SEQ ID NO: 6382):SSLS (SEQ ID NO: 6365), RNVQXRP (SEQ ID NO: 6448):TQVQL (SEQ ID NO: 6393):SSLS (SEQ ID NO: 6365), KIPKAXX (SEQ ID NO: 6445):APTEL (SEQ ID NO: 6368):NAIS (SEQ ID NO: 6357), GIPEPXX (SEQ ID NO: 6440):APTKM (SEQ ID NO: 6370):NAIS (SEQ ID NO: 6357), SIPKAXX (SEQ ID NO: 6450)APTEL (SEQ ID NO: 6368):NAIS (SEQ ID NO: 6357), AVPKAXX (SEQ ID NO: 6439):APTKL (SEQ ID NO: 6369):NAIS (SEQ ID NO: 6357), KVGKAXX (SEQ ID NO: 6446):APTKL (SEQ ID NO: 6369):NAIS (SEQ ID NO: 6357), KASKAXX (SEQ ID NO: 6444):APTKL (SEQ ID NO: 6369):NAIS (SEQ ID NO: 6357), GSAGPXX (SEQ ID NO: 6441):APTKM (SEQ ID NO: 6370):NAIS (SEQ ID NO: 6357), AAPASXX (SEQ ID NO: 6436):APTRL (SEQ ID NO: 6373):NAIS (SEQ ID NO: 6357), STPPTXX (SEQ ID NO: 6452)APTRL (SEQ ID NO: 6373):NAIS (SEQ ID NO: 6357), RVPSTXX (SEQ ID NO: 6449):APTKT (SEQ ID NO: 6371):NAIS (SEQ ID NO: 6357), ASAAPXX (SEQ ID NO: 6437):APTAL (SEQ ID NO: 6366):NAIS (SEQ ID NO: 6357), ASASPXX (SEQ ID NO: 6438)APTDL (SEQ ID NO: 6367):NAIS (SEQ ID NO: 6357), KIPKAXX (SEQ ID NO: 6445):VPTEL (SEQ ID NO: 6421):NAIS (SEQ ID NO: 6357), GIPEPXX (SEQ ID NO: 6440):VPEKM (SEQ ID NO: 6406):NAIS (SEQ ID NO: 6357), SIPKAXX (SEQ ID NO: 6450):VPTEL (SEQ ID NO: 6421):NAIS (SEQ ID NO: 6357), KVGKAXX (SEQ ID NO: 6446):VPTKL (SEQ ID NO: 6423):NAIS (SEQ ID NO: 6357), KASKAXX (SEQ ID NO: 6444):VPTKL (SEQ ID NO: 6423):NAIS (SEQ ID NO: 6357), GSAGPXX (SEQ ID NO: 6441):TPTKM (SEQ ID NO: 6388):NAIS (SEQ ID NO: 6357), AAPASXX (SEQ ID NO: 6436):VPARL (SEQ ID NO: 6401):NAIS (SEQ ID NO: 6357), STPPTXX (SEQ ID NO: 6452):VPTRL (SEQ ID NO: 6427):NAIS (SEQ ID NO: 6357), RVPSTXX (SEQ ID NO: 6449):APVKT (SEQ ID NO: 6379):NAIS (SEQ ID NO: 6357), ASAAPXX (SEQ ID NO: 6437):VPQAL (SEQ ID NO: 6410):NAIS (SEQ ID NO: 6357), ASASPXX (SEQ ID NO: 6438):VSODL (SEQ ID NO: 6429):NAIS (SEQ ID NO: 6357), ASASPXX (SEQ ID NO: 6438):VPQDL (SEQ ID NO: 6411):NAIS (SEQ ID NO: 6357), NDEGLEX (SEQ ID NO: 6447):VPTEE (SEQ ID NO: 6420):NAIS (SEQ ID NO: 6357), NDEGLEX (SEQ ID NO: 6447):VPTGQ (SEQ ID NO: 6422):NAIS (SEQ ID NO: 6357), SSVKXQP (SEQ ID NO: 6451):SRVHH (SEQ ID NO: 6382):NAIS (SEQ ID NO: 6357), RNVQXRP (SEQ ID NO: 6448):TQVQL (SEQ ID NO: 6393):NAIS (SEQ ID NO: 6357), KIPKAXX (SEQ ID NO: 6445):APTEL (SEQ ID NO: 6368):SATS (SEQ ID NO: 6361), GIPEPXX (SEQ ID NO: 6440):APTKM (SEQ ID NO: 6370):SATS (SEQ ID NO: 6361), SIPKAXX (SEQ ID NO: 6450):APTEL (SEQ ID NO: 6368):SATS (SEQ ID NO: 6361), HVTKPTX (SEQ ID NO: 6443):APTKL (SEQ ID NO: 6369):SATS (SEQ ID NO: 6361), YVPKPXX (SEQ ID NO: 6454):APTKL (SEQ ID NO: 6369):SATS (SEQ ID NO: 6361), TVPKPXX (SEQ ID NO: 6453):APTQL (SEQ ID NO: 6372):SATS (SEQ ID NO: 6361), KVGKAXX (SEQ ID NO: 6446):APTKL (SEQ ID NO: 6369):SATS (SEQ ID NO: 6361), KASKAXX (SEQ ID NO: 6444):APTKL (SEQ ID NO: 6369):SATS (SEQ ID NO: 6361), GSAGPXX (SEQ ID NO: 6441):APTKM (SEQ ID NO: 6370):SATS (SEQ ID NO: 6361), AAPASXX (SEQ ID NO: 6436):APTRL (SEQ ID NO: 6373):SATS (SEQ ID NO: 6361), STPPTXX (SEQ ID NO: 6452):APTRL (SEQ ID NO: 6373):SATS (SEQ ID NO: 6361), HVPKPXX (SEQ ID NO: 6442):APTKL (SEQ ID NO: 6369):SATS (SEQ ID NO: 6361), RVPSTXX (SEQ ID NO: 6449):APTKT (SEQ ID NO: 6371):SATS (SEQ ID NO: 6361), ASAAPXX (SEQ ID NO: 6437):APTAL (SEQ ID NO: 6366):SATS (SEQ ID NO: 6361), ASASPXX (SEQ ID NO: 6438):APTDL (SEQ ID NO: 6367):SATS (SEQ ID NO: 6361), KIPKAXX (SEQ ID NO: 6445):VPTEL (SEQ ID NO: 6421):SATS (SEQ ID NO: 6361), GIPEPXX (SEQ ID NO: 6440):VPEKM (SEQ ID NO: 6406):SATS (SEQ ID NO: 6361), SIPKAXX (SEQ ID NO: 6450):VPTEL (SEQ ID NO: 6421):SATS (SEQ ID NO: 6361), KVGKAXX (SEQ ID NO: 6446):VPTKL (SEQ ID NO: 6423):SATS (SEQ ID NO: 6361), KASKAXX (SEQ ID NO: 6444):VPTKL (SEQ ID NO: 6423):SATS (SEQ ID NO: 6361), GSAGPXX (SEQ ID NO: 6441):TPTKM (SEQ ID NO: 6388):SATS (SEQ ID NO: 6361), AAPASXX (SEQ ID NO: 6436):VPARL (SEQ ID NO: 6401):SATS (SEQ ID NO: 6361), STPPTXX (SEQ ID NO: 6452):VPTRL (SEQ ID NO: 6427):SATS (SEQ ID NO: 6361), RVPSTXX (SEQ ID NO: 6449):APVKT (SEQ ID NO: 6379):SATS (SEQ ID NO: 6361), ASAAPXX (SEQ ID NO: 6437):VPQAL (SEQ ID NO: 6410):SATS (SEQ ID NO: 6361), ASASPXX (SEQ ID NO: 6438):VSODL (SEQ ID NO: 6429):SATS (SEQ ID NO: 6361), ASASPXX (SEQ ID NO: 6438):VPQDL (SEQ ID NO: 6411):SATS (SEQ ID NO: 6361), NDEGLEX (SEQ ID NO: 6447):VPTEE (SEQ ID NO: 6420):SATS (SEQ ID NO: 6361), NDEGLEX (SEQ ID NO: 6447):VPTGQ (SEQ ID NO: 6422):SATS (SEQ ID NO: 6361), SSVKXQP (SEQ ID NO: 6451):SRVHH (SEQ ID NO: 6382):SATS (SEQ ID NO: 6361), RNVQXRP (SEQ ID NO: 6448):TQVQL (SEQ ID NO: 6393):SATS (SEQ ID NO: 6361), KIPKAXX (SEQ ID NO: 6445):VPTEL (SEQ ID NO: 6421):SPIS (SEQ ID NO: 6364), GIPEPXX (SEQ ID NO: 6440):VPTKM (SEQ ID NO: 6424):SPIS (SEQ ID NO: 6364), SIPKAXX (SEQ ID NO: 6450):VPTEL (SEQ ID NO: 6421):SPIS (SEQ ID NO: 6364), HVTKPTX (SEQ ID NO: 6443):VPTKL (SEQ ID NO: 6423):SPIS (SEQ ID NO: 6364), YVPKPXX (SEQ ID NO: 6454):VPTKL (SEQ ID NO: 6423):SPIS (SEQ ID NO: 6364), TVPKPXX (SEQ ID NO: 6453):VPTQL (SEQ ID NO: 6426):SPIS (SEQ ID NO: 6364), AVPKAXX (SEQ ID NO: 6439):VPTKL (SEQ ID NO: 6423):SPIS (SEQ ID NO: 6364), KASKAXX (SEQ ID NO: 6444):VPTKL (SEQ ID NO: 6423):SPIS (SEQ ID NO: 6364), GSAGPXX (SEQ ID NO: 6441):VPTKM (SEQ ID NO: 6424):SPIS (SEQ ID NO: 6364), AAPASXX (SEQ ID NO: 6436):VPTRL (SEQ ID NO: 6427):SPIS (SEQ ID NO: 6364), STPPTXX (SEQ ID NO: 6452):VPTRL (SEQ ID NO: 6427):SPIS (SEQ ID NO: 6364), HVPKPXX (SEQ ID NO: 6442):VPTKL (SEQ ID NO: 6423):SPIS (SEQ ID NO: 6364), RVPSTXX (SEQ ID NO: 6449):VPTKT (SEQ ID NO: 6425):SPIS (SEQ ID NO: 6364), ASAAPXX (SEQ ID NO: 6437):VPTAL (SEQ ID NO: 6418):SPIS (SEQ ID NO: 6364), ASASPXX (SEQ ID NO: 6438):VPTDL (SEQ ID NO: 6419):SPIS (SEQ ID NO: 6364), GIPEPXX (SEQ ID NO: 6440):VPEKM (SEQ ID NO: 6406):SPIS (SEQ ID NO: 6364), HVTKPTX (SEQ ID NO: 6443):APTKL (SEQ ID NO: 6369):SPIS (SEQ ID NO: 6364), YVPKPXX (SEQ ID NO: 6454):APTKL (SEQ ID NO: 6369):SPIS (SEQ ID NO: 6364), TVPKPXX (SEQ ID NO: 6453):APTQL (SEQ ID NO: 6372):SPIS (SEQ ID NO: 6364), AVPKAXX (SEQ ID NO: 6439):APTKL (SEQ ID NO: 6369):SPIS (SEQ ID NO: 6364), GSAGPXX (SEQ ID NO: 6441):TPTKM (SEQ ID NO: 6388):SPIS (SEQ ID NO: 6364), AAPASXX (SEQ ID NO: 6436):VPARL (SEQ ID NO: 6401):SPIS (SEQ ID NO: 6364), HVPKPXX (SEQ ID NO: 6442):APTKL (SEQ ID NO: 6369):SPIS (SEQ ID NO: 6364), RVPSTXX (SEQ ID NO: 6449):APVKT (SEQ ID NO: 6379):SPIS (SEQ ID NO: 6364), ASAAPXX (SEQ ID NO: 6437):VPQAL (SEQ ID NO: 6410):SPIS (SEQ ID NO: 6364), ASASPXX (SEQ ID NO: 6438):VSODL (SEQ ID NO: 6429):SPIS (SEQ ID NO: 6364), ASASPXX (SEQ ID NO: 6438):VPQDL (SEQ ID NO: 6411):SPIS (SEQ ID NO: 6364), SSVKXQP (SEQ ID NO: 6451):SRVHH (SEQ ID NO: 6382):SPIS (SEQ ID NO: 6364), RNVQXRP (SEQ ID NO: 6448):TQVQL (SEQ ID NO: 6393):SPIS (SEQ ID NO: 6364), KIPKAXX (SEQ ID NO: 6445):VPTEL (SEQ ID NO: 6421):EPIS (SEQ ID NO: 6353), GIPEPXX (SEQ ID NO: 6440):VPTKM (SEQ ID NO: 6424):EPIS (SEQ ID NO: 6353), SIPKAXX (SEQ ID NO: 6450):VPTEL (SEQ ID NO: 6421):EPIS (SEQ ID NO: 6353), HVTKPTX (SEQ ID NO: 6443):VPTKL (SEQ ID NO: 6423):EPIS (SEQ ID NO: 6353), YVPKPXX (SEQ ID NO: 6454):VPTKL (SEQ ID NO: 6423):EPIS (SEQ ID NO: 6353), TVPKPXX (SEQ ID NO: 6453):VPTQL (SEQ ID NO: 6426):EPIS (SEQ ID NO: 6353), AVPKAXX (SEQ ID NO: 6439):VPTKL (SEQ ID NO: 6423):EPIS (SEQ ID NO: 6353), KVGKAXX (SEQ ID NO: 6446):VPTKL (SEQ ID NO: 6423):EPIS (SEQ ID NO: 6353), GSAGPXX (SEQ ID NO: 6441):VPTKM (SEQ ID NO: 6424):EPIS (SEQ ID NO: 6353), AAPASXX (SEQ ID NO: 6436):VPTRL (SEQ ID NO: 6427):EPIS (SEQ ID NO: 6353), STPPTXX (SEQ ID NO: 6452):VPTRL (SEQ ID NO: 6427):EPIS (SEQ ID NO: 6353), HVPKPXX (SEQ ID NO: 6442):VPTKL (SEQ ID NO: 6423):EPIS (SEQ ID NO: 6353), RVPSTXX (SEQ ID NO: 6449):VPTKT (SEQ ID NO: 6425):EPIS (SEQ ID NO: 6353), ASAAPXX (SEQ ID NO: 6437):VPTAL (SEQ ID NO: 6418):EPIS (SEQ ID NO: 6353), ASASPXX (SEQ ID NO: 6438):VPTDL (SEQ ID NO: 6419):EPIS (SEQ ID NO: 6353), GIPEPXX (SEQ ID NO: 6440):VPEKM (SEQ ID NO: 6406):EPIS (SEQ ID NO: 6353), HVTKPTX (SEQ ID NO: 6443):APTKL (SEQ ID NO: 6369):EPIS (SEQ ID NO: 6353), YVPKPXX (SEQ ID NO: 6454):APTKL (SEQ ID NO: 6369):EPIS (SEQ ID NO: 6353), TVPKPXX (SEQ ID NO: 6453):APTQL (SEQ ID NO: 6372):EPIS (SEQ ID NO: 6353), AVPKAXX (SEQ ID NO: 6439):APTKL (SEQ ID NO: 6369):EPIS (SEQ ID NO: 6353), GSAGPXX (SEQ ID NO: 6441):TPTKM (SEQ ID NO: 6388):EPIS (SEQ ID NO: 6353), AAPASXX (SEQ ID NO: 6436):VPARL (SEQ ID NO: 6401):EPIS (SEQ ID NO: 6353), HVPKPXX (SEQ ID NO: 6442):APTKL (SEQ ID NO: 6369):EPIS (SEQ ID NO: 6353), RVPSTXX (SEQ ID NO: 6449):APVKT (SEQ ID NO: 6379):EPIS (SEQ ID NO: 6353), ASAAPXX (SEQ ID NO: 6437):VPQAL (SEQ ID NO: 6410):EPIS (SEQ ID NO: 6353), ASASPXX (SEQ ID NO: 6438):VSODL (SEQ ID NO: 6429):EPIS (SEQ ID NO: 6353), ASASPXX (SEQ ID NO: 6438):VPQDL (SEQ ID NO: 6411):EPIS (SEQ ID NO: 6353), SSVKXQP (SEQ ID NO: 6451):SRVHH (SEQ ID NO: 6382):EPIS (SEQ ID NO: 6353), RNVQXRP (SEQ ID NO: 6448):TQVQL (SEQ ID NO: 6393):EPIS (SEQ ID NO: 6353), KIPKAXX (SEQ ID NO: 6445):TPTEL (SEQ ID NO: 6386):SPIN (SEQ ID NO: 6363), GIPEPXX (SEQ ID NO: 6440):TPTKM (SEQ ID NO: 6388):SPIN (SEQ ID NO: 6363), SIPKAXX (SEQ ID NO: 6450):TPTEL (SEQ ID NO: 6386):SPIN (SEQ ID NO: 6363), HVTKPTX (SEQ ID NO: 6443):TPTKL (SEQ ID NO: 6387):SPIN (SEQ ID NO: 6363), YVPKPXX (SEQ ID NO: 6454):TPTKL (SEQ ID NO: 6387):SPIN (SEQ ID NO: 6363), TVPKPXX (SEQ ID NO: 6453):TPTQL (SEQ ID NO: 6390):SPIN (SEQ ID NO: 6363), AVPKAXX (SEQ ID NO: 6439):TPTKL (SEQ ID NO: 6387):SPIN (SEQ ID NO: 6363), KVGKAXX (SEQ ID NO: 6446):TPTKL (SEQ ID NO: 6387):SPIN (SEQ ID NO: 6363), KASKAXX (SEQ ID NO: 6444):TPTKL (SEQ ID NO: 6387):SPIN (SEQ ID NO: 6363), AAPASXX (SEQ ID NO: 6436):TPTRL (SEQ ID NO: 6391):SPIN (SEQ ID NO: 6363), STPPTXX (SEQ ID NO: 6452):TPTRL (SEQ ID NO: 6391):SPIN (SEQ ID NO: 6363), HVPKPXX (SEQ ID NO: 6442):TPTKL (SEQ ID NO: 6387):SPIN (SEQ ID NO: 6363), RVPSTXX (SEQ ID NO: 6449):TPTKT (SEQ ID NO: 6389):SPIN (SEQ ID NO: 6363), ASAAPXX (SEQ ID NO: 6437):TPTAL (SEQ ID NO: 6384):SPIN (SEQ ID NO: 6363), ASASPXX (SEQ ID NO: 6438):TPTDL (SEQ ID NO: 6385):SPIN (SEQ ID NO: 6363), KIPKAXX (SEQ ID NO: 6445):VPTEL (SEQ ID NO: 6421):SPIN (SEQ ID NO: 6363), GIPEPXX (SEQ ID NO: 6440):VPEKM (SEQ ID NO: 6406):SPIN (SEQ ID NO: 6363), SIPKAXX (SEQ ID NO: 6450):VPTEL (SEQ ID NO: 6421):SPIN (SEQ ID NO: 6363), HVTKPTX (SEQ ID NO: 6443):APTKL (SEQ ID NO: 6369):SPIN (SEQ ID NO: 6363), YVPKPXX (SEQ ID NO: 6454)APTKL (SEQ ID NO: 6369):SPIN (SEQ ID NO: 6363), TVPKPXX (SEQ ID NO: 6453):APTQL (SEQ ID NO: 6372):SPIN (SEQ ID NO: 6363), AVPKAXX (SEQ ID NO: 6439):APTKL (SEQ ID NO: 6369):SPIN (SEQ ID NO: 6363), KVGKAXX (SEQ ID NO: 6446):VPTKL (SEQ ID NO: 6423):SPIN (SEQ ID NO: 6363), KASKAXX (SEQ ID NO: 6444):VPTKL (SEQ ID NO: 6423):SPIN (SEQ ID NO: 6363), AAPASXX (SEQ ID NO: 6436):VPARL (SEQ ID NO: 6401):SPIN (SEQ ID NO: 6363), STPPTXX (SEQ ID NO: 6452):VPTRL (SEQ ID NO: 6427):SPIN (SEQ ID NO: 6363), HVPKPXX (SEQ ID NO: 6442):APTKL (SEQ ID NO: 6369):SPIN (SEQ ID NO: 6363), RVPSTXX (SEQ ID NO: 6449)APVKT (SEQ ID NO: 6379):SPIN (SEQ ID NO: 6363), ASAAPXX (SEQ ID NO: 6437):VPQAL (SEQ ID NO: 6410):SPIN (SEQ ID NO: 6363), ASASPXX (SEQ ID NO: 6438):VSODL (SEQ ID NO: 6429):SPIN (SEQ ID NO: 6363), ASASPXX (SEQ ID NO: 6438):VPQDL (SEQ ID NO: 6411):SPIN (SEQ ID NO: 6363), NDEGLEX (SEQ ID NO: 6447):VPTEE (SEQ ID NO: 6420):SPIN (SEQ ID NO: 6363), NDEGLEX (SEQ ID NO: 6447):VPTGQ (SEQ ID NO: 6422):SPIN (SEQ ID NO: 6363), SSVKXQP (SEQ ID NO: 6451):SRVHH (SEQ ID NO: 6382):SPIN (SEQ ID NO: 6363), RNVQXRP (SEQ ID NO: 6448):TQVQL (SEQ ID NO: 6393):SPIN (SEQ ID NO: 6363), KIPKAXX (SEQ ID NO: 6445):VPAEL (SEQ ID NO: 6396):SPIS (SEQ ID NO: 6364), GIPEPXX (SEQ ID NO: 6440):VPAKM (SEQ ID NO: 6398):SPIS (SEQ ID NO: 6364), SIPKAXX (SEQ ID NO: 6450):VPAEL (SEQ ID NO: 6396):SPIS (SEQ ID NO: 6364), HVTKPTX (SEQ ID NO: 6443):VPAKL (SEQ ID NO: 6397):SPIS (SEQ ID NO: 6364), YVPKPXX (SEQ ID NO: 6454):VPAKL (SEQ ID NO: 6397):SPIS (SEQ ID NO: 6364), TVPKPXX (SEQ ID NO: 6453):VPAQL (SEQ ID NO: 6400):SPIS (SEQ ID NO: 6364), AVPKAXX (SEQ ID NO: 6439):VPAKL (SEQ ID NO: 6397):SPIS (SEQ ID NO: 6364), KVGKAXX (SEQ ID NO: 6446):VPAKL (SEQ ID NO: 6397):SPIS (SEQ ID NO: 6364), KASKAXX (SEQ ID NO: 6444):VPAKL (SEQ ID NO: 6397):SPIS (SEQ ID NO: 6364), GSAGPXX (SEQ ID NO: 6441):VPAKM (SEQ ID NO: 6398):SPIS (SEQ ID NO: 6364), STPPTXX (SEQ ID NO: 6452):VPARL (SEQ ID NO: 6401):SPIS (SEQ ID NO: 6364), HVPKPXX (SEQ ID NO: 6442):VPAKL (SEQ ID NO: 6397):SPIS (SEQ ID NO: 6364), RVPSTXX (SEQ ID NO: 6449):VPAKT (SEQ ID NO: 6399):SPIS (SEQ ID NO: 6364), ASAAPXX (SEQ ID NO: 6437):VPAAL (SEQ ID NO: 6394):SPIS (SEQ ID NO: 6364), ASASPXX (SEQ ID NO: 6438):VPADL (SEQ ID NO: 6395):SPIS (SEQ ID NO: 6364), KVGKAXX (SEQ ID NO: 6446):VPTKL (SEQ ID NO: 6423):SPIS (SEQ ID NO: 6364), NDEGLEX (SEQ ID NO: 6447):VPTEE (SEQ ID NO: 6420):SPIS (SEQ ID NO: 6364), NDEGLEX (SEQ ID NO: 6447):VPTGQ (SEQ ID NO: 6422):SPIS (SEQ ID NO: 6364), KIPKAXX (SEQ ID NO: 6445):APVEL (SEQ ID NO: 6376):KPLS (SEQ ID NO: 6356), GIPEPXX (SEQ ID NO: 6440):APVKM (SEQ ID NO: 6378):KPLS (SEQ ID NO: 6356), SIPKAXX (SEQ ID NO: 6450):APVEL (SEQ ID NO: 6376):KPLS (SEQ ID NO: 6356), HVTKPTX (SEQ ID NO: 6443):APVKL (SEQ ID NO: 6377):KPLS (SEQ ID NO: 6356), YVPKPXX (SEQ ID NO: 6454):APVKL (SEQ ID NO: 6377):KPLS (SEQ ID NO: 6356), TVPKPXX (SEQ ID NO: 6453):APVQL (SEQ ID NO: 6380):KPLS (SEQ ID NO: 6356), AVPKAXX (SEQ ID NO: 6439):APVKL (SEQ ID NO: 6377):KPLS (SEQ ID NO: 6356), KVGKAXX (SEQ ID NO: 6446):APVKL (SEQ ID NO: 6377):KPLS (SEQ ID NO: 6356), KASKAXX (SEQ ID NO: 6444):APVKL (SEQ ID NO: 6377):KPLS (SEQ ID NO: 6356), GSAGPXX (SEQ ID NO: 6441):APVKM (SEQ ID NO: 6378):KPLS (SEQ ID NO: 6356), AAPASXX (SEQ ID NO: 6436):APVRL (SEQ ID NO: 6381):KPLS (SEQ ID NO: 6356), STPPTXX (SEQ ID NO: 6452)APVRL (SEQ ID NO: 6381):KPLS (SEQ ID NO: 6356), HVPKPXX (SEQ ID NO: 6442):APVKL (SEQ ID NO: 6377):KPLS (SEQ ID NO: 6356), ASAAPXX (SEQ ID NO: 6437):APVAL (SEQ ID NO: 6374):KPLS (SEQ ID NO: 6356), ASASPXX (SEQ ID NO: 6438):APVDL (SEQ ID NO: 6375):KPLS (SEQ ID NO: 6356), KIPKAXX (SEQ ID NO: 6445):VPTEL (SEQ ID NO: 6421):KPLS (SEQ ID NO: 6356), GIPEPXX (SEQ ID NO: 6440):VPEKM (SEQ ID NO: 6406):KPLS (SEQ ID NO: 6356), SIPKAXX (SEQ ID NO: 6450):VPTEL (SEQ ID NO: 6421):KPLS (SEQ ID NO: 6356), HVTKPTX (SEQ ID NO: 6443):APTKL (SEQ ID NO: 6369):KPLS (SEQ ID NO: 6356), YVPKPXX (SEQ ID NO: 6454):APTKL (SEQ ID NO: 6369):KPLS (SEQ ID NO: 6356), TVPKPXX (SEQ ID NO: 6453):APTQL (SEQ ID NO: 6372):KPLS (SEQ ID NO: 6356), AVPKAXX (SEQ ID NO: 6439):APTKL (SEQ ID NO: 6369):KPLS (SEQ ID NO: 6356), KVGKAXX (SEQ ID NO: 6446):VPTKL (SEQ ID NO: 6423):KPLS (SEQ ID NO: 6356), KASKAXX (SEQ ID NO: 6444):VPTKL (SEQ ID NO: 6423):KPLS (SEQ ID NO: 6356), GSAGPXX (SEQ ID NO: 6441):TPTKM (SEQ ID NO: 6388):KPLS (SEQ ID NO: 6356), AAPASXX (SEQ ID NO: 6436):VPARL (SEQ ID NO: 6401):KPLS (SEQ ID NO: 6356), STPPTXX (SEQ ID NO: 6452):VPTRL (SEQ ID NO: 6427):KPLS (SEQ ID NO: 6356), HVPKPXX (SEQ ID NO: 6442):APTKL (SEQ ID NO: 6369):KPLS (SEQ ID NO: 6356), ASAAPXX (SEQ ID NO: 6437):VPQAL (SEQ ID NO: 6410):KPLS (SEQ ID NO: 6356), ASASPXX (SEQ ID NO: 6438):VSODL (SEQ ID NO: 6429):KPLS (SEQ ID NO: 6356), ASASPXX (SEQ ID NO: 6438):VPQDL (SEQ ID NO: 6411):KPLS (SEQ ID NO: 6356), NDEGLEX (SEQ ID NO: 6447):VPTEE (SEQ ID NO: 6420):KPLS (SEQ ID NO: 6356), NDEGLEX (SEQ ID NO: 6447):VPTGQ (SEQ ID NO: 6422):KPLS (SEQ ID NO: 6356), SSVKXQP (SEQ ID NO: 6451):SRVHH (SEQ ID NO: 6382):KPLS (SEQ ID NO: 6356), RNVQXRP (SEQ ID NO: 6448):TQVQL (SEQ ID NO: 6393):KPLS (SEQ ID NO: 6356), KIPKAXX (SEQ ID NO: 6445):VPQEL (SEQ ID NO: 6412):EPLP (SEQ ID NO: 6354), GIPEPXX (SEQ ID NO: 6440):VPQKM (SEQ ID NO: 6414):EPLP (SEQ ID NO: 6354), SIPKAXX (SEQ ID NO: 6450):VPQEL (SEQ ID NO: 6412):EPLP (SEQ ID NO: 6354), HVTKPTX (SEQ ID NO: 6443):VPQKL (SEQ ID NO: 6413):EPLP (SEQ ID NO: 6354), YVPKPXX (SEQ ID NO: 6454):VPQKL (SEQ ID NO: 6413):EPLP (SEQ ID NO: 6354), TVPKPXX (SEQ ID NO: 6453):VPQQL (SEQ ID NO: 6416):EPLP (SEQ ID NO: 6354), AVPKAXX (SEQ ID NO: 6439):VPQKL (SEQ ID NO: 6413):EPLP (SEQ ID NO: 6354), KVGKAXX (SEQ ID NO: 6446):VPQKL (SEQ ID NO: 6413):EPLP (SEQ ID NO: 6354), KASKAXX (SEQ ID NO: 6444):VPQKL (SEQ ID NO: 6413):EPLP (SEQ ID NO: 6354), GSAGPXX (SEQ ID NO: 6441):VPQKM (SEQ ID NO: 6414):EPLP (SEQ ID NO: 6354), AAPASXX (SEQ ID NO: 6436):VPQRL (SEQ ID NO: 6417):EPLP (SEQ ID NO: 6354), STPPTXX (SEQ ID NO: 6452):VPQRL (SEQ ID NO: 6417):EPLP (SEQ ID NO: 6354), HVPKPXX (SEQ ID NO: 6442):VPQKL (SEQ ID NO: 6413):EPLP (SEQ ID NO: 6354), RVPSTXX (SEQ ID NO: 6449):VPQKT (SEQ ID NO: 6415):EPLP (SEQ ID NO: 6354), ASASPXX (SEQ ID NO: 6438):VPQDL (SEQ ID NO: 6411):EPLP (SEQ ID NO: 6354), KIPKAXX (SEQ ID NO: 6445):VPTEL (SEQ ID NO: 6421):EPLP (SEQ ID NO: 6354), GIPEPXX (SEQ ID NO: 6440):VPEKM (SEQ ID NO: 6406):EPLP (SEQ ID NO: 6354), SIPKAXX (SEQ ID NO: 6450):VPTEL (SEQ ID NO: 6421):EPLP (SEQ ID NO: 6354), HVTKPTX (SEQ ID NO: 6443):APTKL (SEQ ID NO: 6369):EPLP (SEQ ID NO: 6354), YVPKPXX (SEQ ID NO: 6454):APTKL (SEQ ID NO: 6369):EPLP (SEQ ID NO: 6354), TVPKPXX (SEQ ID NO: 6453):APTQL (SEQ ID NO: 6372):EPLP (SEQ ID NO: 6354), AVPKAXX (SEQ ID NO: 6439):APTKL (SEQ ID NO: 6369):EPLP (SEQ ID NO: 6354), KVGKAXX (SEQ ID NO: 6446):VPTKL (SEQ ID NO: 6423):EPLP (SEQ ID NO: 6354), KASKAXX (SEQ ID NO: 6444):VPTKL (SEQ ID NO: 6423):EPLP (SEQ ID NO: 6354), GSAGPXX (SEQ ID NO: 6441):TPTKM (SEQ ID NO: 6388):EPLP (SEQ ID NO: 6354), AAPASXX (SEQ ID NO: 6436):VPARL (SEQ ID NO: 6401):EPLP (SEQ ID NO: 6354), STPPTXX (SEQ ID NO: 6452):VPTRL (SEQ ID NO: 6427):EPLP (SEQ ID NO: 6354), HVPKPXX (SEQ ID NO: 6442):APTKL (SEQ ID NO: 6369):EPLP (SEQ ID NO: 6354), RVPSTXX (SEQ ID NO: 6449):APVKT (SEQ ID NO: 6379):EPLP (SEQ ID NO: 6354), ASASPXX (SEQ ID NO: 6438):VSODL (SEQ ID NO: 6429):EPLP (SEQ ID NO: 6354), NDEGLEX (SEQ ID NO: 6447):VPTEE (SEQ ID NO: 6420):EPLP (SEQ ID NO: 6354), NDEGLEX (SEQ ID NO: 6447):VPTGQ (SEQ ID NO: 6422):EPLP (SEQ ID NO: 6354), SSVKXQP (SEQ ID NO: 6451):SRVHH (SEQ ID NO: 6382):EPLP (SEQ ID NO: 6354), RNVQXRP (SEQ ID NO: 6448):TQVQL (SEQ ID NO: 6393):EPLP (SEQ ID NO: 6354), KIPKAXX (SEQ ID NO: 6445):VSQEL (SEQ ID NO: 6430):EPLT (SEQ ID NO: 6355), GIPEPXX (SEQ ID NO: 6440):VSQKM (SEQ ID NO: 6432):EPLT (SEQ ID NO: 6355), SIPKAXX (SEQ ID NO: 6450):VSQEL (SEQ ID NO: 6430):EPLT (SEQ ID NO: 6355), HVTKPTX (SEQ ID NO: 6443):VSQKL (SEQ ID NO: 6431):EPLT (SEQ ID NO: 6355), YVPKPXX (SEQ ID NO: 6454):VSQKL (SEQ ID NO: 6431):EPLT (SEQ ID NO: 6355), TVPKPXX (SEQ ID NO: 6453):VSQOL (SEQ ID NO: 6434):EPLT (SEQ ID NO: 6355), AVPKAXX (SEQ ID NO: 6439):VSQKL (SEQ ID NO: 6431):EPLT (SEQ ID NO: 6355), KVGKAXX (SEQ ID NO: 6446):VSQKL (SEQ ID NO: 6431):EPLT (SEQ ID NO: 6355), KASKAXX (SEQ ID NO: 6444):VSQKL (SEQ ID NO: 6431):EPLT (SEQ ID NO: 6355), GSAGPXX (SEQ ID NO: 6441):VSQKM (SEQ ID NO: 6432):EPLT (SEQ ID NO: 6355), AAPASXX (SEQ ID NO: 6436):VSQRL (SEQ ID NO: 6435):EPLT (SEQ ID NO: 6355), STPPTXX (SEQ ID NO: 6452):VSQRL (SEQ ID NO: 6435):EPLT (SEQ ID NO: 6355), HVPKPXX (SEQ ID NO: 6442):VSQKL (SEQ ID NO: 6431):EPLT (SEQ ID NO: 6355), RVPSTXX (SEQ ID NO: 6449):VSQKT (SEQ ID NO: 6433):EPLT (SEQ ID NO: 6355), ASAAPXX (SEQ ID NO: 6437):VSQAL (SEQ ID NO: 6428):EPLT (SEQ ID NO: 6355), ASASPXX (SEQ ID NO: 6438):VSODL (SEQ ID NO: 6429):EPLT (SEQ ID NO: 6355), KIPKAXX (SEQ ID NO: 6445):VPTEL (SEQ ID NO: 6421):EPLT (SEQ ID NO: 6355), GIPEPXX (SEQ ID NO: 6440):VPEKM (SEQ ID NO: 6406):EPLT (SEQ ID NO: 6355), SIPKAXX (SEQ ID NO: 6450):VPTEL (SEQ ID NO: 6421):EPLT (SEQ ID NO: 6355), HVTKPTX (SEQ ID NO: 6443):APTKL (SEQ ID NO: 6369):EPLT (SEQ ID NO: 6355), YVPKPXX (SEQ ID NO: 6454):APTKL (SEQ ID NO: 6369):EPLT (SEQ ID NO: 6355), TVPKPXX (SEQ ID NO: 6453):APTQL (SEQ ID NO: 6372):EPLT (SEQ ID NO: 6355), AVPKAXX (SEQ ID NO: 6439):APTKL (SEQ ID NO: 6369):EPLT (SEQ ID NO: 6355), KVGKAXX (SEQ ID NO: 6446):VPTKL (SEQ ID NO: 6423):EPLT (SEQ ID NO: 6355), KASKAXX (SEQ ID NO: 6444):VPTKL (SEQ ID NO: 6423):EPLT (SEQ ID NO: 6355), GSAGPXX (SEQ ID NO: 6441):TPTKM (SEQ ID NO: 6388):EPLT (SEQ ID NO: 6355), AAPASXX (SEQ ID NO: 6436):VPARL (SEQ ID NO: 6401):EPLT (SEQ ID NO: 6355), STPPTXX (SEQ ID NO: 6452):VPTRL (SEQ ID NO: 6427):EPLT (SEQ ID NO: 6355), HVPKPXX (SEQ ID NO: 6442)APTKL (SEQ ID NO: 6369):EPLT (SEQ ID NO: 6355), RVPSTXX (SEQ ID NO: 6449):APVKT (SEQ ID NO: 6379):EPLT (SEQ ID NO: 6355), ASAAPXX (SEQ ID NO: 6437):VPQAL (SEQ ID NO: 6410):EPLT (SEQ ID NO: 6355), NDEGLEX (SEQ ID NO: 6447):VPTEE (SEQ ID NO: 6420):EPLT (SEQ ID NO: 6355), NDEGLEX (SEQ ID NO: 6447):VPTGQ (SEQ ID NO: 6422):EPLT (SEQ ID NO: 6355), SSVKXQP (SEQ ID NO: 6451):SRVHH (SEQ ID NO: 6382):EPLT (SEQ ID NO: 6355), RNVQXRP (SEQ ID NO: 6448):TQVQL (SEQ ID NO: 6393):EPLT (SEQ ID NO: 6355), KIPKAXX (SEQ ID NO: 6445):VPQEL (SEQ ID NO: 6412):EPLT (SEQ ID NO: 6355), GIPEPXX (SEQ ID NO: 6440):VPQKM (SEQ ID NO: 6414):EPLT (SEQ ID NO: 6355), SIPKAXX (SEQ ID NO: 6450):VPQEL (SEQ ID NO: 6412):EPLT (SEQ ID NO: 6355), HVTKPTX (SEQ ID NO: 6443):VPQKL (SEQ ID NO: 6413):EPLT (SEQ ID NO: 6355), YVPKPXX (SEQ ID NO: 6454):VPQKL (SEQ ID NO: 6413):EPLT (SEQ ID NO: 6355), TVPKPXX (SEQ ID NO: 6453):VPQQL (SEQ ID NO: 6416):EPLT (SEQ ID NO: 6355), AVPKAXX (SEQ ID NO: 6439):VPQKL (SEQ ID NO: 6413):EPLT (SEQ ID NO: 6355), KVGKAXX (SEQ ID NO: 6446):VPQKL (SEQ ID NO: 6413):EPLT (SEQ ID NO: 6355), KASKAXX (SEQ ID NO: 6444):VPQKL (SEQ ID NO: 6413):EPLT (SEQ ID NO: 6355), GSAGPXX (SEQ ID NO: 6441):VPQKM (SEQ ID NO: 6414):EPLT (SEQ ID NO: 6355), AAPASXX (SEQ ID NO: 6436):VPQRL (SEQ ID NO: 6417):EPLT (SEQ ID NO: 6355), STPPTXX (SEQ ID NO: 6452):VPQRL (SEQ ID NO: 6417):EPLT (SEQ ID NO: 6355), HVPKPXX (SEQ ID NO: 6442):VPQKL (SEQ ID NO: 6413):EPLT (SEQ ID NO: 6355), RVPSTXX (SEQ ID NO: 6449):VPQKT (SEQ ID NO: 6415):EPLT (SEQ ID NO: 6355), ASASPXX (SEQ ID NO: 6438):VPQDL (SEQ ID NO: 6411):EPLT (SEQ ID NO: 6355), NDEGLEX (SEQ ID NO: 6447):VPTGQ (SEQ ID NO: 6422):SNIT (SEQ ID NO: 6362), GIPEPXX (SEQ ID NO: 6440):VPEKM (SEQ ID NO: 6406):SNIT (SEQ ID NO: 6362), HVTKPTX (SEQ ID NO: 6443)APTKL (SEQ ID NO: 6369):SNIT (SEQ ID NO: 6362), YVPKPXX (SEQ ID NO: 6454):APTKL (SEQ ID NO: 6369):SNIT (SEQ ID NO: 6362), TVPKPXX (SEQ ID NO: 6453):APTQL (SEQ ID NO: 6372):SNIT (SEQ ID NO: 6362), AVPKAXX (SEQ ID NO: 6439):APTKL (SEQ ID NO: 6369):SNIT (SEQ ID NO: 6362), GSAGPXX (SEQ ID NO: 6441):TPTKM (SEQ ID NO: 6388):SNIT (SEQ ID NO: 6362), AAPASXX (SEQ ID NO: 6436):VPARL (SEQ ID NO: 6401):SNIT (SEQ ID NO: 6362), HVPKPXX (SEQ ID NO: 6442):APTKL (SEQ ID NO: 6369):SNIT (SEQ ID NO: 6362), RVPSTXX (SEQ ID NO: 6449):APVKT (SEQ ID NO: 6379):SNIT (SEQ ID NO: 6362), ASAAPXX (SEQ ID NO: 6437):VPQAL (SEQ ID NO: 6410):SNIT (SEQ ID NO: 6362), ASASPXX (SEQ ID NO: 6438):VSODL (SEQ ID NO: 6429):SNIT (SEQ ID NO: 6362), ASASPXX (SEQ ID NO: 6438):VPQDL (SEQ ID NO: 6411):SNIT (SEQ ID NO: 6362), SSVKXQP (SEQ ID NO: 6451):SRVHH (SEQ ID NO: 6382):SNIT (SEQ ID NO: 6362), RNVQXRP (SEQ ID NO: 6448):TQVQL (SEQ ID NO: 6393):SNIT (SEQ ID NO: 6362), RNVQXRP (SEQ ID NO: 6448):SRVQL (SEQ ID NO: 6383):RSVK (SEQ ID NO: 6359), KIPKAXX (SEQ ID NO: 6445):VPTEL (SEQ ID NO: 6421):RSVK (SEQ ID NO: 6359), GIPEPXX (SEQ ID NO: 6440):VPEKM (SEQ ID NO: 6406):RSVK (SEQ ID NO: 6359), SIPKAXX (SEQ ID NO: 6450):VPTEL (SEQ ID NO: 6421):RSVK (SEQ ID NO: 6359), HVTKPTX (SEQ ID NO: 6443):APTKL (SEQ ID NO: 6369):RSVK (SEQ ID NO: 6359), YVPKPXX (SEQ ID NO: 6454):APTKL (SEQ ID NO: 6369):RSVK (SEQ ID NO: 6359), TVPKPXX (SEQ ID NO: 6453):APTQL (SEQ ID NO: 6372):RSVK (SEQ ID NO: 6359), AVPKAXX (SEQ ID NO: 6439):APTKL (SEQ ID NO: 6369):RSVK (SEQ ID NO: 6359), KVGKAXX (SEQ ID NO: 6446):VPTKL (SEQ ID NO: 6423):RSVK (SEQ ID NO: 6359), KASKAXX (SEQ ID NO: 6444):VPTKL (SEQ ID NO: 6423):RSVK (SEQ ID NO: 6359), GSAGPXX (SEQ ID NO: 6441):TPTKM (SEQ ID NO: 6388):RSVK (SEQ ID NO: 6359), AAPASXX (SEQ ID NO: 6436):VPARL (SEQ ID NO: 6401):RSVK (SEQ ID NO: 6359), STPPTXX (SEQ ID NO: 6452):VPTRL (SEQ ID NO: 6427):RSVK (SEQ ID NO: 6359), HVPKPXX (SEQ ID NO: 6442):APTKL (SEQ ID NO: 6369):RSVK (SEQ ID NO: 6359), RVPSTXX (SEQ ID NO: 6449):APVKT (SEQ ID NO: 6379):RSVK (SEQ ID NO: 6359), ASAAPXX (SEQ ID NO: 6437):VPQAL (SEQ ID NO: 6410):RSVK (SEQ ID NO: 6359), ASASPXX (SEQ ID NO: 6438):VSODL (SEQ ID NO: 6429):RSVK (SEQ ID NO: 6359), ASASPXX (SEQ ID NO: 6438):VPQDL (SEQ ID NO: 6411):RSVK (SEQ ID NO: 6359), NDEGLEX (SEQ ID NO: 6447):VPTEE (SEQ ID NO: 6420):RSVK (SEQ ID NO: 6359), NDEGLEX (SEQ ID NO: 6447):VPTGQ (SEQ ID NO: 6422):RSVK (SEQ ID NO: 6359), RNVQXRP (SEQ ID NO: 6448):TQVQL (SEQ ID NO: 6393):RSVK (SEQ ID NO: 6359), SSVKXQP (SEQ ID NO: 6451):TQVHH (SEQ ID NO: 6392):RPVQ (SEQ ID NO: 6358), KIPKAXX (SEQ ID NO: 6445):VPTEL (SEQ ID NO: 6421):RPVQ (SEQ ID NO: 6358), GIPEPXX (SEQ ID NO: 6440):VPEKM (SEQ ID NO: 6406):RPVQ (SEQ ID NO: 6358), SIPKAXX (SEQ ID NO: 6450):VPTEL (SEQ ID NO: 6421):RPVQ (SEQ ID NO: 6358), HVTKPTX (SEQ ID NO: 6443):APTKL (SEQ ID NO: 6369):RPVQ (SEQ ID NO: 6358), YVPKPXX (SEQ ID NO: 6454):APTKL (SEQ ID NO: 6369):RPVQ (SEQ ID NO: 6358), TVPKPXX (SEQ ID NO: 6453):APTQL (SEQ ID NO: 6372):RPVQ (SEQ ID NO: 6358), AVPKAXX (SEQ ID NO: 6439):APTKL (SEQ ID NO: 6369):RPVQ (SEQ ID NO: 6358), KVGKAXX (SEQ ID NO: 6446):VPTKL (SEQ ID NO: 6423):RPVQ (SEQ ID NO: 6358), KASKAXX (SEQ ID NO: 6444):VPTKL (SEQ ID NO: 6423):RPVQ (SEQ ID NO: 6358), GSAGPXX (SEQ ID NO: 6441):TPTKM (SEQ ID NO: 6388):RPVQ (SEQ ID NO: 6358), AAPASXX (SEQ ID NO: 6436):VPARL (SEQ ID NO: 6401):RPVQ (SEQ ID NO: 6358), STPPTXX (SEQ ID NO: 6452):VPTRL (SEQ ID NO: 6427):RPVQ (SEQ ID NO: 6358), HVPKPXX (SEQ ID NO: 6442):APTKL (SEQ ID NO: 6369):RPVQ (SEQ ID NO: 6358), RVPSTXX (SEQ ID NO: 6449):APVKT (SEQ ID NO: 6379):RPVQ (SEQ ID NO: 6358), ASAAPXX (SEQ ID NO: 6437):VPQAL (SEQ ID NO: 6410):RPVQ (SEQ ID NO: 6358), ASASPXX (SEQ ID NO: 6438):VSODL (SEQ ID NO: 6429):RPVQ (SEQ ID NO: 6358), ASASPXX (SEQ ID NO: 6438):VPQDL (SEQ ID NO: 6411):RPVQ (SEQ ID NO: 6358), NDEGLEX (SEQ ID NO: 6447):VPTEE (SEQ ID NO: 6420):RPVQ (SEQ ID NO: 6358), NDEGLEX (SEQ ID NO: 6447):VPTGQ (SEQ ID NO: 6422):RPVQ (SEQ ID NO: 6358) and SSVKXQP (SEQ ID NO: 6451):SRVHH (SEQ ID NO: 6382):RPVQ (SEQ ID NO: 6358).

[0315] In certain embodiments, the triplet PEP7:PEP5:PEP12 is selected from the group consisting of GIPEPXX (SEQ ID NO: 6440):VPTKM (SEQ ID NO: 6424):SAIS-AA17-LYL (SEQ ID NO: 6598), HVTKPTX (SEQ ID NO: 6443):VPTKL (SEQ ID NO: 6423):SAIS-AA17-LYL (SEQ ID NO: 6598), YVPKPXX (SEQ ID NO: 6454):VPTKL (SEQ ID NO: 6423):SAIS-AA17-LYL (SEQ ID NO: 6598), TVPKPXX (SEQ ID NO: 6453):VPTQL (SEQ ID NO: 6426):SAIS-AA17-LYL (SEQ ID NO: 6598), AVPKAXX (SEQ ID NO: 6439):VPTKL (SEQ ID NO: 6423):SAIS-AA17-LYL (SEQ ID NO: 6598), KVGKAXX (SEQ ID NO: 6446):VPTKL (SEQ ID NO: 6423):SAIS-AA17-LYL (SEQ ID NO: 6598), KASKAXX (SEQ ID NO: 6444):VPTKL (SEQ ID NO: 6423):SAIS-AA17-LYL (SEQ ID NO: 6598), GSAGPXX (SEQ ID NO: 6441):VPTKM (SEQ ID NO: 6424):SAIS-AA17-LYL (SEQ ID NO: 6598), AAPASXX (SEQ ID NO: 6436):VPTRL (SEQ ID NO: 6427):SAIS-AA17-LYL (SEQ ID NO: 6598), STPPTXX (SEQ ID NO: 6452):VPTRL (SEQ ID NO: 6427):SAIS-AA17-LYL (SEQ ID NO: 6598), HVPKPXX (SEQ ID NO: 6442):VPTKL (SEQ ID NO: 6423):SAIS-AA17-LYL (SEQ ID NO: 6598), RVPSTXX (SEQ ID NO: 6449):VPTKT (SEQ ID NO: 6425):SAIS-AA17-LYL (SEQ ID NO: 6598), ASAAPXX (SEQ ID NO: 6437):VPTAL (SEQ ID NO: 6418):SAIS-AA17-LYL (SEQ ID NO: 6598), ASASPXX (SEQ ID NO: 6438):VPTDL (SEQ ID NO: 6419):SAIS-AA17-LYL (SEQ ID NO: 6598), GIPEPXX (SEQ ID NO: 6440):VPEKM (SEQ ID NO: 6406):SAIS-AA17-LYL (SEQ ID NO: 6598), HVTKPTX (SEQ ID NO: 6443):APTKL (SEQ ID NO: 6369):SAIS-AA17-LYL (SEQ ID NO: 6598), YVPKPXX (SEQ ID NO: 6454):APTKL (SEQ ID NO: 6369):SAIS-AA17-LYL (SEQ ID NO: 6598), TVPKPXX (SEQ ID NO: 6453):APTQL (SEQ ID NO: 6372):SAIS-AA17-LYL (SEQ ID NO: 6598), AVPKAXX (SEQ ID NO: 6439):APTKL (SEQ ID NO: 6369):SAIS-AA17-LYL (SEQ ID NO: 6598), GSAGPXX (SEQ ID NO: 6441):TPTKM (SEQ ID NO: 6388):SAIS-AA17-LYL (SEQ ID NO: 6598), AAPASXX (SEQ ID NO: 6436):VPARL (SEQ ID NO: 6401):SAIS-AA17-LYL (SEQ ID NO: 6598), HVPKPXX (SEQ ID NO: 6442):APTKL (SEQ ID NO: 6369):SAIS-AA17-LYL (SEQ ID NO: 6598), RVPSTXX (SEQ ID NO: 6449):APVKT (SEQ ID NO: 6379):SAIS-AA17-LYL (SEQ ID NO: 6598), ASAAPXX (SEQ ID NO: 6437):VPQAL (SEQ ID NO: 6410):SAIS-AA17-LYL (SEQ ID NO: 6598), ASASPXX (SEQ ID NO: 6438):VSODL (SEQ ID NO: 6429):SAIS-AA17-LYL (SEQ ID NO: 6598), ASASPXX (SEQ ID NO: 6438):VPQDL (SEQ ID NO: 6411):SAIS-AA17-LYL (SEQ ID NO: 6598), SSVKXQP (SEQ ID NO: 6451):SRVHH (SEQ ID NO: 6382):SAIS-AA17-LYL (SEQ ID NO: 6598), RNVQXRP (SEQ ID NO: 6448):TQVQL (SEQ ID NO: 6393):SAIS-AA17-LYL (SEQ ID NO: 6598), KIPKAXX (SEQ ID NO: 6445):VPEEL (SEQ ID NO: 6404):SSLS-AA17-LFF (SEQ ID NO: 6605), SIPKAXX (SEQ ID NO: 6450):VPEEL (SEQ ID NO: 6404):SSLS-AA17-LFF (SEQ ID NO: 6605), HVTKPTX (SEQ ID NO: 6443):VPEKL (SEQ ID NO: 6405):SSLS-AA17-LFF (SEQ ID NO: 6605), YVPKPXX (SEQ ID NO: 6454):VPEKL (SEQ ID NO: 6405):SSLS-AA17-LFF (SEQ ID NO: 6605), TVPKPXX (SEQ ID NO: 6453):VPEQL (SEQ ID NO: 6408):SSLS-AA17-LFF (SEQ ID NO: 6605), AVPKAXX (SEQ ID NO: 6439):VPEKL (SEQ ID NO: 6405):SSLS-AA17-LFF (SEQ ID NO: 6605), KVGKAXX (SEQ ID NO: 6446):VPEKL (SEQ ID NO: 6405):SSLS-AA17-LFF (SEQ ID NO: 6605), KASKAXX (SEQ ID NO: 6444):VPEKL (SEQ ID NO: 6405):SSLS-AA17-LFF (SEQ ID NO: 6605), GSAGPXX (SEQ ID NO: 6441):VPEKM (SEQ ID NO: 6406):SSLS-AA17-LFF (SEQ ID NO: 6605), AAPASXX (SEQ ID NO: 6436):VPERL (SEQ ID NO: 6409):SSLS-AA17-LFF (SEQ ID NO: 6605), STPPTXX (SEQ ID NO: 6452):VPERL (SEQ ID NO: 6409):SSLS-AA17-LFF (SEQ ID NO: 6605), HVPKPXX (SEQ ID NO: 6442):VPEKL (SEQ ID NO: 6405):SSLS-AA17-LFF (SEQ ID NO: 6605), RVPSTXX (SEQ ID NO: 6449):VPEKT (SEQ ID NO: 6407):SSLS-AA17-LFF (SEQ ID NO: 6605), ASAAPXX (SEQ ID NO: 6437):VPEAL (SEQ ID NO: 6402):SSLS-AA17-LFF (SEQ ID NO: 6605), ASASPXX (SEQ ID NO: 6438):VPEDL (SEQ ID NO: 6403):SSLS-AA17-LFF (SEQ ID NO: 6605), KIPKAXX (SEQ ID NO: 6445):VPTEL (SEQ ID NO: 6421):SSLS-AA17-LFF (SEQ ID NO: 6605), SIPKAXX (SEQ ID NO: 6450):VPTEL (SEQ ID NO: 6421):SSLS-AA17-LFF (SEQ ID NO: 6605), HVTKPTX (SEQ ID NO: 6443):APTKL (SEQ ID NO: 6369):SSLS-AA17-LFF (SEQ ID NO: 6605), YVPKPXX (SEQ ID NO: 6454):APTKL (SEQ ID NO: 6369):SSLS-AA17-LFF (SEQ ID NO: 6605), TVPKPXX (SEQ ID NO: 6453):APTQL (SEQ ID NO: 6372):SSLS-AA17-LFF (SEQ ID NO: 6605), AVPKAXX (SEQ ID NO: 6439):APTKL (SEQ ID NO: 6369):SSLS-AA17-LFF (SEQ ID NO: 6605), KVGKAXX (SEQ ID NO: 6446):VPTKL (SEQ ID NO: 6423):SSLS-AA17-LFF (SEQ ID NO: 6605), KASKAXX (SEQ ID NO: 6444):VPTKL (SEQ ID NO: 6423):SSLS-AA17-LFF (SEQ ID NO: 6605), GSAGPXX (SEQ ID NO: 6441):TPTKM (SEQ ID NO: 6388):SSLS-AA17-LFF (SEQ ID NO: 6605), AAPASXX (SEQ ID NO: 6436):VPARL (SEQ ID NO: 6401):SSLS-AA17-LFF (SEQ ID NO: 6605), STPPTXX (SEQ ID NO: 6452):VPTRL (SEQ ID NO: 6427):SSLS-AA17-LFF (SEQ ID NO: 6605), HVPKPXX (SEQ ID NO: 6442):APTKL (SEQ ID NO: 6369):SSLS-AA17-LFF (SEQ ID NO: 6605), RVPSTXX (SEQ ID NO: 6449):APVKT (SEQ ID NO: 6379):SSLS-AA17-LFF (SEQ ID NO: 6605), ASAAPXX (SEQ ID NO: 6437):VPQAL (SEQ ID NO: 6410):SSLS-AA17-LFF (SEQ ID NO: 6605), ASASPXX (SEQ ID NO: 6438):VSODL (SEQ ID NO: 6429):SSLS-AA17-LFF (SEQ ID NO: 6605), ASASPXX (SEQ ID NO: 6438):VPQDL (SEQ ID NO: 6411):SSLS-AA17-LFF (SEQ ID NO: 6605), NDEGLEX (SEQ ID NO: 6447):VPTEE (SEQ ID NO: 6420):SSLS-AA17-LFF (SEQ ID NO: 6605), NDEGLEX (SEQ ID NO: 6447):VPTGQ (SEQ ID NO: 6422):SSLS-AA17-LFF (SEQ ID NO: 6605), SSVKXQP (SEQ ID NO: 6451):SRVHH (SEQ ID NO: 6382):SSLS-AA17-LFF (SEQ ID NO: 6605), RNVQXRP (SEQ ID NO: 6448):TQVQL (SEQ ID NO: 6393):SSLS-AA17-LFF (SEQ ID NO: 6605), KIPKAXX (SEQ ID NO: 6445):APTEL (SEQ ID NO: 6368):NAIS-AA17-LYF (SEQ ID NO: 6595), GIPEPXX (SEQ ID NO: 6440):APTKM (SEQ ID NO: 6370):NAIS-AA17-LYF (SEQ ID NO: 6595), SIPKAXX (SEQ ID NO: 6450):APTEL (SEQ ID NO: 6368):NAIS-AA17-LYF (SEQ ID NO: 6595), AVPKAXX (SEQ ID NO: 6439):APTKL (SEQ ID NO: 6369):NAIS-AA17-LYF (SEQ ID NO: 6595), KVGKAXX (SEQ ID NO: 6446):APTKL (SEQ ID NO: 6369):NAIS-AA17-LYF (SEQ ID NO: 6595), KASKAXX (SEQ ID NO: 6444):APTKL (SEQ ID NO: 6369):NAIS-AA17-LYF (SEQ ID NO: 6595), GSAGPXX (SEQ ID NO: 6441):APTKM (SEQ ID NO: 6370):NAIS-AA17-LYF (SEQ ID NO: 6595), AAPASXX (SEQ ID NO: 6436):APTRL (SEQ ID NO: 6373):NAIS-AA17-LYF (SEQ ID NO: 6595), STPPTXX (SEQ ID NO: 6452):APTRL (SEQ ID NO: 6373):NAIS-AA17-LYF (SEQ ID NO: 6595), RVPSTXX (SEQ ID NO: 6449):APTKT (SEQ ID NO: 6371):NAIS-AA17-LYF (SEQ ID NO: 6595), ASAAPXX (SEQ ID NO: 6437):APTAL (SEQ ID NO: 6366):NAIS-AA17-LYF (SEQ ID NO: 6595), ASASPXX (SEQ ID NO: 6438):APTDL (SEQ ID NO: 6367):NAIS-AA17-LYF (SEQ ID NO: 6595), KIPKAXX (SEQ ID NO: 6445):VPTEL (SEQ ID NO: 6421):NAIS-AA17-LYF (SEQ ID NO: 6595), GIPEPXX (SEQ ID NO: 6440):VPEKM (SEQ ID NO: 6406):NAIS-AA17-LYF (SEQ ID NO: 6595), SIPKAXX (SEQ ID NO: 6450):VPTEL (SEQ ID NO: 6421):NAIS-AA17-LYF (SEQ ID NO: 6595), KVGKAXX (SEQ ID NO: 6446):VPTKL (SEQ ID NO: 6423):NAIS-AA17-LYF (SEQ ID NO: 6595), KASKAXX (SEQ ID NO: 6444):VPTKL (SEQ ID NO: 6423):NAIS-AA17-LYF (SEQ ID NO: 6595), GSAGPXX (SEQ ID NO: 6441):TPTKM (SEQ ID NO: 6388):NAIS-AA17-LYF (SEQ ID NO: 6595), AAPASXX (SEQ ID NO: 6436):VPARL (SEQ ID NO: 6401):NAIS-AA17-LYF (SEQ ID NO: 6595), STPPTXX (SEQ ID NO: 6452):VPTRL (SEQ ID NO: 6427):NAIS-AA17-LYF (SEQ ID NO: 6595), RVPSTXX (SEQ ID NO: 6449):APVKT (SEQ ID NO: 6379):NAIS-AA17-LYF (SEQ ID NO: 6595), ASAAPXX (SEQ ID NO: 6437):VPQAL (SEQ ID NO: 6410):NAIS-AA17-LYF (SEQ ID NO: 6595), ASASPXX (SEQ ID NO: 6438):VSODL (SEQ ID NO: 6429):NAIS-AA17-LYF (SEQ ID NO: 6595), ASASPXX (SEQ ID NO: 6438):VPQDL (SEQ ID NO: 6411):NAIS-AA17-LYF (SEQ ID NO: 6595), NDEGLEX (SEQ ID NO: 6447):VPTEE (SEQ ID NO: 6420):NAIS-AA17-LYF (SEQ ID NO: 6595), NDEGLEX (SEQ ID NO: 6447):VPTGQ (SEQ ID NO: 6422):NAIS-AA17-LYF (SEQ ID NO: 6595), SSVKXQP (SEQ ID NO: 6451):SRVHH (SEQ ID NO: 6382):NAIS-AA17-LYF (SEQ ID NO: 6595), RNVQXRP (SEQ ID NO: 6448):TQVQL (SEQ ID NO: 6393):NAIS-AA17-LYF (SEQ ID NO: 6595), KIPKAXX (SEQ ID NO: 6445):APTEL (SEQ ID NO: 6368):SATS-AA17-LYY (SEQ ID NO: 6599), GIPEPXX (SEQ ID NO: 6440):APTKM (SEQ ID NO: 6370):SATS-AA17-LYY (SEQ ID NO: 6599), SIPKAXX (SEQ ID NO: 6450):APTEL (SEQ ID NO: 6368):SATS-AA17-LYY (SEQ ID NO: 6599), HVTKPTX (SEQ ID NO: 6443):APTKL (SEQ ID NO: 6369):SATS-AA17-LYY (SEQ ID NO: 6599), YVPKPXX (SEQ ID NO: 6454):APTKL (SEQ ID NO: 6369):SATS-AA17-LYY (SEQ ID NO: 6599), TVPKPXX (SEQ ID NO: 6453):APTQL (SEQ ID NO: 6372):SATS-AA17-LYY (SEQ ID NO: 6599), KVGKAXX (SEQ ID NO: 6446):APTKL (SEQ ID NO: 6369):SATS-AA17-LYY (SEQ ID NO: 6599), KASKAXX (SEQ ID NO: 6444):APTKL (SEQ ID NO: 6369):SATS-AA17-LYY (SEQ ID NO: 6599), GSAGPXX (SEQ ID NO: 6441):APTKM (SEQ ID NO: 6370):SATS-AA17-LYY (SEQ ID NO: 6599), AAPASXX (SEQ ID NO: 6436):APTRL (SEQ ID NO: 6373):SATS-AA17-LYY (SEQ ID NO: 6599), STPPTXX (SEQ ID NO: 6452):APTRL (SEQ ID NO: 6373):SATS-AA17-LYY (SEQ ID NO: 6599), HVPKPXX (SEQ ID NO: 6442):APTKL (SEQ ID NO: 6369):SATS-AA17-LYY (SEQ ID NO: 6599), RVPSTXX (SEQ ID NO: 6449):APTKT (SEQ ID NO: 6371):SATS-AA17-LYY (SEQ ID NO: 6599), ASAAPXX (SEQ ID NO: 6437):APTAL (SEQ ID NO: 6366):SATS-AA17-LYY (SEQ ID NO: 6599), ASASPXX (SEQ ID NO: 6438):APTDL (SEQ ID NO: 6367):SATS-AA17-LYY (SEQ ID NO: 6599), KIPKAXX (SEQ ID NO: 6445):VPTEL (SEQ ID NO: 6421):SATS-AA17-LYY (SEQ ID NO: 6599), GIPEPXX (SEQ ID NO: 6440):VPEKM (SEQ ID NO: 6406):SATS-AA17-LYY (SEQ ID NO: 6599), SIPKAXX (SEQ ID NO: 6450):VPTEL (SEQ ID NO: 6421):SATS-AA17-LYY (SEQ ID NO: 6599), KVGKAXX (SEQ ID NO: 6446):VPTKL (SEQ ID NO: 6423):SATS-AA17-LYY (SEQ ID NO: 6599), KASKAXX (SEQ ID NO: 6444):VPTKL (SEQ ID NO: 6423):SATS-AA17-LYY (SEQ ID NO: 6599), GSAGPXX (SEQ ID NO: 6441):TPTKM (SEQ ID NO: 6388):SATS-AA17-LYY (SEQ ID NO: 6599), AAPASXX (SEQ ID NO: 6436):VPARL (SEQ ID NO: 6401):SATS-AA17-LYY (SEQ ID NO: 6599), STPPTXX (SEQ ID NO: 6452):VPTRL (SEQ ID NO: 6427):SATS-AA17-LYY (SEQ ID NO: 6599), RVPSTXX (SEQ ID NO: 6449):APVKT (SEQ ID NO: 6379):SATS-AA17-LYY (SEQ ID NO: 6599), ASAAPXX (SEQ ID NO: 6437):VPQAL (SEQ ID NO: 6410):SATS-AA17-LYY (SEQ ID NO: 6599), ASASPXX (SEQ ID NO: 6438):VSODL (SEQ ID NO: 6429):SATS-AA17-LYY (SEQ ID NO: 6599), ASASPXX (SEQ ID NO: 6438):VPQDL (SEQ ID NO: 6411):SATS-AA17-LYY (SEQ ID NO: 6599), NDEGLEX (SEQ ID NO: 6447):VPTEE (SEQ ID NO: 6420):SATS-AA17-LYY (SEQ ID NO: 6599), NDEGLEX (SEQ ID NO: 6447):VPTGQ (SEQ ID NO: 6422):SATS-AA17-LYY (SEQ ID NO: 6599), SSVKXQP (SEQ ID NO: 6451):SRVHH (SEQ ID NO: 6382):SATS-AA17-LYY (SEQ ID NO: 6599), RNVQXRP (SEQ ID NO: 6448):TQVQL (SEQ ID NO: 6393):SATS-AA17-LYY (SEQ ID NO: 6599), KIPKAXX (SEQ ID NO: 6445):VPTEL (SEQ ID NO: 6421):SPIS-AA17-LYK (SEQ ID NO: 6604), GIPEPXX (SEQ ID NO: 6440):VPTKM (SEQ ID NO: 6424):SPIS-AA17-LYK (SEQ ID NO: 6604), SIPKAXX (SEQ ID NO: 6450):VPTEL (SEQ ID NO: 6421):SPIS-AA17-LYK (SEQ ID NO: 6604), HVTKPTX (SEQ ID NO: 6443):VPTKL (SEQ ID NO: 6423):SPIS-AA17-LYK (SEQ ID NO: 6604), YVPKPXX (SEQ ID NO: 6454):VPTKL (SEQ ID NO: 6423):SPIS-AA17-LYK (SEQ ID NO: 6604), TVPKPXX (SEQ ID NO: 6453):VPTQL (SEQ ID NO: 6426):SPIS-AA17-LYK (SEQ ID NO: 6604), AVPKAXX (SEQ ID NO: 6439):VPTKL (SEQ ID NO: 6423):SPIS-AA17-LYK (SEQ ID NO: 6604), KASKAXX (SEQ ID NO: 6444):VPTKL (SEQ ID NO: 6423):SPIS-AA17-LYK (SEQ ID NO: 6604), GSAGPXX (SEQ ID NO: 6441):VPTKM (SEQ ID NO: 6424):SPIS-AA17-LYK (SEQ ID NO: 6604), AAPASXX (SEQ ID NO: 6436):VPTRL (SEQ ID NO: 6427):SPIS-AA17-LYK (SEQ ID NO: 6604), STPPTXX (SEQ ID NO: 6452):VPTRL (SEQ ID NO: 6427):SPIS-AA17-LYK (SEQ ID NO: 6604), HVPKPXX (SEQ ID NO: 6442):VPTKL (SEQ ID NO: 6423):SPIS-AA17-LYK (SEQ ID NO: 6604), RVPSTXX (SEQ ID NO: 6449):VPTKT (SEQ ID NO: 6425):SPIS-AA17-LYK (SEQ ID NO: 6604), ASAAPXX (SEQ ID NO: 6437):VPTAL (SEQ ID NO: 6418):SPIS-AA17-LYK (SEQ ID NO: 6604), ASASPXX (SEQ ID NO: 6438):VPTDL (SEQ ID NO: 6419):SPIS-AA17-LYK (SEQ ID NO: 6604), GIPEPXX (SEQ ID NO: 6440):VPEKM (SEQ ID NO: 6406):SPIS-AA17-LYK (SEQ ID NO: 6604), HVTKPTX (SEQ ID NO: 6443):APTKL (SEQ ID NO: 6369):SPIS-AA17-LYK (SEQ ID NO: 6604), YVPKPXX (SEQ ID NO: 6454):APTKL (SEQ ID NO: 6369):SPIS-AA17-LYK (SEQ ID NO: 6604), TVPKPXX (SEQ ID NO: 6453):APTQL (SEQ ID NO: 6372):SPIS-AA17-LYK (SEQ ID NO: 6604), AVPKAXX (SEQ ID NO: 6439):APTKL (SEQ ID NO: 6369):SPIS-AA17-LYK (SEQ ID NO: 6604), GSAGPXX (SEQ ID NO: 6441):TPTKM (SEQ ID NO: 6388):SPIS-AA17-LYK (SEQ ID NO: 6604), AAPASXX (SEQ ID NO: 6436):VPARL (SEQ ID NO: 6401):SPIS-AA17-LYK (SEQ ID NO: 6604), HVPKPXX (SEQ ID NO: 6442):APTKL (SEQ ID NO: 6369):SPIS-AA17-LYK (SEQ ID NO: 6604), RVPSTXX (SEQ ID NO: 6449):APVKT (SEQ ID NO: 6379):SPIS-AA17-LYK (SEQ ID NO: 6604), ASAAPXX (SEQ ID NO: 6437):VPQAL (SEQ ID NO: 6410):SPIS-AA17-LYK (SEQ ID NO: 6604), ASASPXX (SEQ ID NO: 6438):VSODL (SEQ ID NO: 6429):SPIS-AA17-LYK (SEQ ID NO: 6604), ASASPXX (SEQ ID NO: 6438):VPQDL (SEQ ID NO: 6411):SPIS-AA17-LYK (SEQ ID NO: 6604), SSVKXQP (SEQ ID NO: 6451):SRVHH (SEQ ID NO: 6382):SPIS-AA17-LYK (SEQ ID NO: 6604), RNVQXRP (SEQ ID NO: 6448):TQVQL (SEQ ID NO: 6393):SPIS-AA17-LYK (SEQ ID NO: 6604), KIPKAXX (SEQ ID NO: 6445):VPTEL (SEQ ID NO: 6421):EPIS-AA17-LYL (SEQ ID NO: 6591), GIPEPXX (SEQ ID NO: 6440):VPTKM (SEQ ID NO: 6424):EPIS-AA17-LYL (SEQ ID NO: 6591), SIPKAXX (SEQ ID NO: 6450):VPTEL (SEQ ID NO: 6421):EPIS-AA17-LYL (SEQ ID NO: 6591), HVTKPTX (SEQ ID NO: 6443):VPTKL (SEQ ID NO: 6423):EPIS-AA17-LYL (SEQ ID NO: 6591), YVPKPXX (SEQ ID NO: 6454):VPTKL (SEQ ID NO: 6423):EPIS-AA17-LYL (SEQ ID NO: 6591), TVPKPXX (SEQ ID NO: 6453):VPTQL (SEQ ID NO: 6426):EPIS-AA17-LYL (SEQ ID NO: 6591), AVPKAXX (SEQ ID NO: 6439):VPTKL (SEQ ID NO: 6423):EPIS-AA17-LYL (SEQ ID NO: 6591), KVGKAXX (SEQ ID NO: 6446):VPTKL (SEQ ID NO: 6423):EPIS-AA17-LYL (SEQ ID NO: 6591), GSAGPXX (SEQ ID NO: 6441):VPTKM (SEQ ID NO: 6424):EPIS-AA17-LYL (SEQ ID NO: 6591), AAPASXX (SEQ ID NO: 6436):VPTRL (SEQ ID NO: 6427):EPIS-AA17-LYL (SEQ ID NO: 6591), STPPTXX (SEQ ID NO: 6452):VPTRL (SEQ ID NO: 6427):EPIS-AA17-LYL (SEQ ID NO: 6591), HVPKPXX (SEQ ID NO: 6442):VPTKL (SEQ ID NO: 6423):EPIS-AA17-LYL (SEQ ID NO: 6591), RVPSTXX (SEQ ID NO: 6449):VPTKT (SEQ ID NO: 6425):EPIS-AA17-LYL (SEQ ID NO: 6591), ASAAPXX (SEQ ID NO: 6437):VPTAL (SEQ ID NO: 6418):EPIS-AA17-LYL (SEQ ID NO: 6591), ASASPXX (SEQ ID NO: 6438):VPTDL (SEQ ID NO: 6419):EPIS-AA17-LYL (SEQ ID NO: 6591), GIPEPXX (SEQ ID NO: 6440):VPEKM (SEQ ID NO: 6406):EPIS-AA17-LYL (SEQ ID NO: 6591), HVTKPTX (SEQ ID NO: 6443):APTKL (SEQ ID NO: 6369):EPIS-AA17-LYL (SEQ ID NO: 6591), YVPKPXX (SEQ ID NO: 6454):APTKL (SEQ ID NO: 6369):EPIS-AA17-LYL (SEQ ID NO: 6591), TVPKPXX (SEQ ID NO: 6453):APTQL (SEQ ID NO: 6372):EPIS-AA17-LYL (SEQ ID NO: 6591), AVPKAXX (SEQ ID NO: 6439):APTKL (SEQ ID NO: 6369):EPIS-AA17-LYL (SEQ ID NO: 6591), GSAGPXX (SEQ ID NO: 6441):TPTKM (SEQ ID NO: 6388):EPIS-AA17-LYL (SEQ ID NO: 6591), AAPASXX (SEQ ID NO: 6436):VPARL (SEQ ID NO: 6401):EPIS-AA17-LYL (SEQ ID NO: 6591), HVPKPXX (SEQ ID NO: 6442):APTKL (SEQ ID NO: 6369):EPIS-AA17-LYL (SEQ ID NO: 6591), RVPSTXX (SEQ ID NO: 6449):APVKT (SEQ ID NO: 6379):EPIS-AA17-LYL (SEQ ID NO: 6591), ASAAPXX (SEQ ID NO: 6437):VPQAL (SEQ ID NO: 6410):EPIS-AA17-LYL (SEQ ID NO: 6591), ASASPXX (SEQ ID NO: 6438):VSODL (SEQ ID NO: 6429):EPIS-AA17-LYL (SEQ ID NO: 6591), ASASPXX (SEQ ID NO: 6438):VPQDL (SEQ ID NO: 6411):EPIS-AA17-LYL (SEQ ID NO: 6591), SSVKXQP (SEQ ID NO: 6451):SRVHH (SEQ ID NO: 6382):EPIS-AA17-LYL (SEQ ID NO: 6591), RNVQXRP (SEQ ID NO: 6448):TQVQL (SEQ ID NO: 6393):EPIS-AA17-LYL (SEQ ID NO: 6591), KIPKAXX (SEQ ID NO: 6445):TPTEL (SEQ ID NO: 6386):SPIN-AA17-LYF (SEQ ID NO: 6601), GIPEPXX (SEQ ID NO: 6440):TPTKM (SEQ ID NO: 6388):SPIN-AA17-LYF (SEQ ID NO: 6601), SIPKAXX (SEQ ID NO: 6450):TPTEL (SEQ ID NO: 6386):SPIN-AA17-LYF (SEQ ID NO: 6601), HVTKPTX (SEQ ID NO: 6443):TPTKL (SEQ ID NO: 6387):SPIN-AA17-LYF (SEQ ID NO: 6601), YVPKPXX (SEQ ID NO: 6454):TPTKL (SEQ ID NO: 6387):SPIN-AA17-LYF (SEQ ID NO: 6601), TVPKPXX (SEQ ID NO: 6453):TPTQL (SEQ ID NO: 6390):SPIN-AA17-LYF (SEQ ID NO: 6601), AVPKAXX (SEQ ID NO: 6439):TPTKL (SEQ ID NO: 6387):SPIN-AA17-LYF (SEQ ID NO: 6601), KVGKAXX (SEQ ID NO: 6446):TPTKL (SEQ ID NO: 6387):SPIN-AA17-LYF (SEQ ID NO: 6601), KASKAXX (SEQ ID NO: 6444):TPTKL (SEQ ID NO: 6387):SPIN-AA17-LYF (SEQ ID NO: 6601), AAPASXX (SEQ ID NO: 6436):TPTRL (SEQ ID NO: 6391):SPIN-AA17-LYF (SEQ ID NO: 6601), STPPTXX (SEQ ID NO: 6452):TPTRL (SEQ ID NO: 6391):SPIN-AA17-LYF (SEQ ID NO: 6601), HVPKPXX (SEQ ID NO: 6442):TPTKL (SEQ ID NO: 6387):SPIN-AA17-LYF (SEQ ID NO: 6601), RVPSTXX (SEQ ID NO: 6449):TPTKT (SEQ ID NO: 6389):SPIN-AA17-LYF (SEQ ID NO: 6601), ASAAPXX (SEQ ID NO: 6437):TPTAL (SEQ ID NO: 6384):SPIN-AA17-LYF (SEQ ID NO: 6601), ASASPXX (SEQ ID NO: 6438):TPTDL (SEQ ID NO: 6385):SPIN-AA17-LYF (SEQ ID NO: 6601), KIPKAXX (SEQ ID NO: 6445):VPTEL (SEQ ID NO: 6421):SPIN-AA17-LYF (SEQ ID NO: 6601), GIPEPXX (SEQ ID NO: 6440):VPEKM (SEQ ID NO: 6406):SPIN-AA17-LYF (SEQ ID NO: 6601), SIPKAXX (SEQ ID NO: 6450):VPTEL (SEQ ID NO: 6421):SPIN-AA17-LYF (SEQ ID NO: 6601), HVTKPTX (SEQ ID NO: 6443):APTKL (SEQ ID NO: 6369):SPIN-AA17-LYF (SEQ ID NO: 6601), YVPKPXX (SEQ ID NO: 6454):APTKL (SEQ ID NO: 6369):SPIN-AA17-LYF (SEQ ID NO: 6601), TVPKPXX (SEQ ID NO: 6453):APTQL (SEQ ID NO: 6372):SPIN-AA17-LYF (SEQ ID NO: 6601), AVPKAXX (SEQ ID NO: 6439):APTKL (SEQ ID NO: 6369):SPIN-AA17-LYF (SEQ ID NO: 6601), KVGKAXX (SEQ ID NO: 6446):VPTKL (SEQ ID NO: 6423):SPIN-AA17-LYF (SEQ ID NO: 6601), KASKAXX (SEQ ID NO: 6444):VPTKL (SEQ ID NO: 6423):SPIN-AA17-LYF (SEQ ID NO: 6601), AAPASXX (SEQ ID NO: 6436):VPARL (SEQ ID NO: 6401):SPIN-AA17-LYF (SEQ ID NO: 6601), STPPTXX (SEQ ID NO: 6452):VPTRL (SEQ ID NO: 6427):SPIN-AA17-LYF (SEQ ID NO: 6601), HVPKPXX (SEQ ID NO: 6442):APTKL (SEQ ID NO: 6369):SPIN-AA17-LYF (SEQ ID NO: 6601), RVPSTXX (SEQ ID NO: 6449):APVKT (SEQ ID NO: 6379):SPIN-AA17-LYF (SEQ ID NO: 6601), ASAAPXX (SEQ ID NO: 6437):VPQAL (SEQ ID NO: 6410):SPIN-AA17-LYF (SEQ ID NO: 6601), ASASPXX (SEQ ID NO: 6438):VSODL (SEQ ID NO: 6429):SPIN-AA17-LYF (SEQ ID NO: 6601), ASASPXX (SEQ ID NO: 6438):VPQDL (SEQ ID NO: 6411):SPIN-AA17-LYF (SEQ ID NO: 6601), NDEGLEX (SEQ ID NO: 6447):VPTEE (SEQ ID NO: 6420):SPIN-AA17-LYF (SEQ ID NO: 6601), NDEGLEX (SEQ ID NO: 6447):VPTGQ (SEQ ID NO: 6422):SPIN-AA17-LYF (SEQ ID NO: 6601), SSVKXQP (SEQ ID NO: 6451):SRVHH (SEQ ID NO: 6382):SPIN-AA17-LYF (SEQ ID NO: 6601), RNVQXRP (SEQ ID NO: 6448):TQVQL (SEQ ID NO: 6393):SPIN-AA17-LYF (SEQ ID NO: 6601), KIPKAXX (SEQ ID NO: 6445):VPAEL (SEQ ID NO: 6396):SPIS-AA17-LYI (SEQ ID NO: 6603), GIPEPXX (SEQ ID NO: 6440):VPAKM (SEQ ID NO: 6398):SPIS-AA17-LYI (SEQ ID NO: 6603), SIPKAXX (SEQ ID NO: 6450):VPAEL (SEQ ID NO: 6396):SPIS-AA17-LYI (SEQ ID NO: 6603), HVTKPTX (SEQ ID NO: 6443):VPAKL (SEQ ID NO: 6397):SPIS-AA17-LYI (SEQ ID NO: 6603), YVPKPXX (SEQ ID NO: 6454):VPAKL (SEQ ID NO: 6397):SPIS-AA17-LYI (SEQ ID NO: 6603), TVPKPXX (SEQ ID NO: 6453):VPAQL (SEQ ID NO: 6400):SPIS-AA17-LYI (SEQ ID NO: 6603), AVPKAXX (SEQ ID NO: 6439):VPAKL (SEQ ID NO: 6397):SPIS-AA17-LYI (SEQ ID NO: 6603), KVGKAXX (SEQ ID NO: 6446):VPAKL (SEQ ID NO: 6397):SPIS-AA17-LYI (SEQ ID NO: 6603), KASKAXX (SEQ ID NO: 6444):VPAKL (SEQ ID NO: 6397):SPIS-AA17-LYI (SEQ ID NO: 6603), GSAGPXX (SEQ ID NO: 6441):VPAKM (SEQ ID NO: 6398):SPIS-AA17-LYI (SEQ ID NO: 6603), STPPTXX (SEQ ID NO: 6452):VPARL (SEQ ID NO: 6401):SPIS-AA17-LYI (SEQ ID NO: 6603), HVPKPXX (SEQ ID NO: 6442):VPAKL (SEQ ID NO: 6397):SPIS-AA17-LYI (SEQ ID NO: 6603), RVPSTXX (SEQ ID NO: 6449):VPAKT (SEQ ID NO: 6399):SPIS-AA17-LYI (SEQ ID NO: 6603), ASAAPXX (SEQ ID NO: 6437):VPAAL (SEQ ID NO: 6394):SPIS-AA17-LYI (SEQ ID NO: 6603), ASASPXX (SEQ ID NO: 6438):VPADL (SEQ ID NO: 6395):SPIS-AA17-LYI (SEQ ID NO: 6603), KIPKAXX (SEQ ID NO: 6445):VPTEL (SEQ ID NO: 6421):SPIS-AA17-LYI (SEQ ID NO: 6603), GIPEPXX (SEQ ID NO: 6440):VPEKM (SEQ ID NO: 6406):SPIS-AA17-LYI (SEQ ID NO: 6603), SIPKAXX (SEQ ID NO: 6450):VPTEL (SEQ ID NO: 6421):SPIS-AA17-LYI (SEQ ID NO: 6603), HVTKPTX (SEQ ID NO: 6443):APTKL (SEQ ID NO: 6369):SPIS-AA17-LYI (SEQ ID NO: 6603), YVPKPXX (SEQ ID NO: 6454):APTKL (SEQ ID NO: 6369):SPIS-AA17-LYI (SEQ ID NO: 6603), TVPKPXX (SEQ ID NO: 6453):APTQL (SEQ ID NO: 6372):SPIS-AA17-LYI (SEQ ID NO: 6603), AVPKAXX (SEQ ID NO: 6439):APTKL (SEQ ID NO: 6369):SPIS-AA17-LYI (SEQ ID NO: 6603), KVGKAXX (SEQ ID NO: 6446):VPTKL (SEQ ID NO: 6423):SPIS-AA17-LYI (SEQ ID NO: 6603), KASKAXX (SEQ ID NO: 6444):VPTKL (SEQ ID NO: 6423):SPIS-AA17-LYI (SEQ ID NO: 6603), GSAGPXX (SEQ ID NO: 6441):TPTKM (SEQ ID NO: 6388):SPIS-AA17-LYI (SEQ ID NO: 6603), STPPTXX (SEQ ID NO: 6452):VPTRL (SEQ ID NO: 6427):SPIS-AA17-LYI (SEQ ID NO: 6603), HVPKPXX (SEQ ID NO: 6442):APTKL (SEQ ID NO: 6369):SPIS-AA17-LYI (SEQ ID NO: 6603), RVPSTXX (SEQ ID NO: 6449):APVKT (SEQ ID NO: 6379):SPIS-AA17-LYI (SEQ ID NO: 6603), ASAAPXX (SEQ ID NO: 6437):VPQAL (SEQ ID NO: 6410):SPIS-AA17-LYI (SEQ ID NO: 6603), ASASPXX (SEQ ID NO: 6438):VSODL (SEQ ID NO: 6429):SPIS-AA17-LYI (SEQ ID NO: 6603), ASASPXX (SEQ ID NO: 6438):VPQDL (SEQ ID NO: 6411):SPIS-AA17-LYI (SEQ ID NO: 6603), NDEGLEX (SEQ ID NO: 6447):VPTEE (SEQ ID NO: 6420):SPIS-AA17-LYI (SEQ ID NO: 6603), NDEGLEX (SEQ ID NO: 6447):VPTGQ (SEQ ID NO: 6422):SPIS-AA17-LYI (SEQ ID NO: 6603), SSVKXQP (SEQ ID NO: 6451):SRVHH (SEQ ID NO: 6382):SPIS-AA17-LYI (SEQ ID NO: 6603), RNVQXRP (SEQ ID NO: 6448):TQVQL (SEQ ID NO: 6393):SPIS-AA17-LYI (SEQ ID NO: 6603), KIPKAXX (SEQ ID NO: 6445):VPTEL (SEQ ID NO: 6421):SPIS-AA17-LFI (SEQ ID NO: 6602), GIPEPXX (SEQ ID NO: 6440):VPTKM (SEQ ID NO: 6424):SPIS-AA17-LFI (SEQ ID NO: 6602), SIPKAXX (SEQ ID NO: 6450):VPTEL (SEQ ID NO: 6421):SPIS-AA17-LFI (SEQ ID NO: 6602), HVTKPTX (SEQ ID NO: 6443):VPTKL (SEQ ID NO: 6423):SPIS-AA17-LFI (SEQ ID NO: 6602), YVPKPXX (SEQ ID NO: 6454):VPTKL (SEQ ID NO: 6423):SPIS-AA17-LFI (SEQ ID NO: 6602), TVPKPXX (SEQ ID NO: 6453):VPTQL (SEQ ID NO: 6426):SPIS-AA17-LFI (SEQ ID NO: 6602), AVPKAXX (SEQ ID NO: 6439):VPTKL (SEQ ID NO: 6423):SPIS-AA17-LFI (SEQ ID NO: 6602), KVGKAXX (SEQ ID NO: 6446):VPTKL (SEQ ID NO: 6423):SPIS-AA17-LFI (SEQ ID NO: 6602), KASKAXX (SEQ ID NO: 6444):VPTKL (SEQ ID NO: 6423):SPIS-AA17-LFI (SEQ ID NO: 6602), GSAGPXX (SEQ ID NO: 6441):VPTKM (SEQ ID NO: 6424):SPIS-AA17-LFI (SEQ ID NO: 6602), AAPASXX (SEQ ID NO: 6436):VPTRL (SEQ ID NO: 6427):SPIS-AA17-LFI (SEQ ID NO: 6602), HVPKPXX (SEQ ID NO: 6442):VPTKL (SEQ ID NO: 6423):SPIS-AA17-LFI (SEQ ID NO: 6602), RVPSTXX (SEQ ID NO: 6449):VPTKT (SEQ ID NO: 6425):SPIS-AA17-LFI (SEQ ID NO: 6602), ASAAPXX (SEQ ID NO: 6437):VPTAL (SEQ ID NO: 6418):SPIS-AA17-LFI (SEQ ID NO: 6602), ASASPXX (SEQ ID NO: 6438):VPTDL (SEQ ID NO: 6419):SPIS-AA17-LFI (SEQ ID NO: 6602), GIPEPXX (SEQ ID NO: 6440):VPEKM (SEQ ID NO: 6406):SPIS-AA17-LFI (SEQ ID NO: 6602), HVTKPTX (SEQ ID NO: 6443):APTKL (SEQ ID NO: 6369):SPIS-AA17-LFI (SEQ ID NO: 6602), YVPKPXX (SEQ ID NO: 6454):APTKL (SEQ ID NO: 6369):SPIS-AA17-LFI (SEQ ID NO: 6602), TVPKPXX (SEQ ID NO: 6453):APTQL (SEQ ID NO: 6372):SPIS-AA17-LFI (SEQ ID NO: 6602), AVPKAXX (SEQ ID NO: 6439):APTKL (SEQ ID NO: 6369):SPIS-AA17-LFI (SEQ ID NO: 6602), GSAGPXX (SEQ ID NO: 6441):TPTKM (SEQ ID NO: 6388):SPIS-AA17-LFI (SEQ ID NO: 6602), AAPASXX (SEQ ID NO: 6436):VPARL (SEQ ID NO: 6401):SPIS-AA17-LFI (SEQ ID NO: 6602), HVPKPXX (SEQ ID NO: 6442):APTKL (SEQ ID NO: 6369):SPIS-AA17-LFI (SEQ ID NO: 6602), RVPSTXX (SEQ ID NO: 6449):APVKT (SEQ ID NO: 6379):SPIS-AA17-LFI (SEQ ID NO: 6602), ASAAPXX (SEQ ID NO: 6437):VPQAL (SEQ ID NO: 6410):SPIS-AA17-LFI (SEQ ID NO: 6602), ASASPXX (SEQ ID NO: 6438):VSODL (SEQ ID NO: 6429):SPIS-AA17-LFI (SEQ ID NO: 6602), ASASPXX (SEQ ID NO: 6438):VPQDL (SEQ ID NO: 6411):SPIS-AA17-LFI (SEQ ID NO: 6602), SSVKXQP (SEQ ID NO: 6451):SRVHH (SEQ ID NO: 6382):SPIS-AA17-LFI (SEQ ID NO: 6602), RNVQXRP (SEQ ID NO: 6448):TQVQL (SEQ ID NO: 6393):SPIS-AA17-LFI (SEQ ID NO: 6602), KIPKAXX (SEQ ID NO: 6445):APVEL (SEQ ID NO: 6376):KPLS-AA17-LYV (SEQ ID NO: 6594), GIPEPXX (SEQ ID NO: 6440):APVKM (SEQ ID NO: 6378):KPLS-AA17-LYV (SEQ ID NO: 6594), SIPKAXX (SEQ ID NO: 6450):APVEL (SEQ ID NO: 6376):KPLS-AA17-LYV (SEQ ID NO: 6594), HVTKPTX (SEQ ID NO: 6443):APVKL (SEQ ID NO: 6377):KPLS-AA17-LYV (SEQ ID NO: 6594), YVPKPXX (SEQ ID NO: 6454):APVKL (SEQ ID NO: 6377):KPLS-AA17-LYV (SEQ ID NO: 6594), TVPKPXX (SEQ ID NO: 6453):APVQL (SEQ ID NO: 6380):KPLS-AA17-LYV (SEQ ID NO: 6594), AVPKAXX (SEQ ID NO: 6439):APVKL (SEQ ID NO: 6377):KPLS-AA17-LYV (SEQ ID NO: 6594), KVGKAXX (SEQ ID NO: 6446):APVKL (SEQ ID NO: 6377):KPLS-AA17-LYV (SEQ ID NO: 6594), KASKAXX (SEQ ID NO: 6444):APVKL (SEQ ID NO: 6377):KPLS-AA17-LYV (SEQ ID NO: 6594), GSAGPXX (SEQ ID NO: 6441):APVKM (SEQ ID NO: 6378):KPLS-AA17-LYV (SEQ ID NO: 6594), AAPASXX (SEQ ID NO: 6436):APVRL (SEQ ID NO: 6381):KPLS-AA17-LYV (SEQ ID NO: 6594), STPPTXX (SEQ ID NO: 6452):APVRL (SEQ ID NO: 6381):KPLS-AA17-LYV (SEQ ID NO: 6594), HVPKPXX (SEQ ID NO: 6442):APVKL (SEQ ID NO: 6377):KPLS-AA17-LYV (SEQ ID NO: 6594), ASAAPXX (SEQ ID NO: 6437):APVAL (SEQ ID NO: 6374):KPLS-AA17-LYV (SEQ ID NO: 6594), ASASPXX (SEQ ID NO: 6438):APVDL (SEQ ID NO: 6375):KPLS-AA17-LYV (SEQ ID NO: 6594), KIPKAXX (SEQ ID NO: 6445):VPTEL (SEQ ID NO: 6421):KPLS-AA17-LYV (SEQ ID NO: 6594), GIPEPXX (SEQ ID NO: 6440):VPEKM (SEQ ID NO: 6406):KPLS-AA17-LYV (SEQ ID NO: 6594), SIPKAXX (SEQ ID NO: 6450):VPTEL (SEQ ID NO: 6421):KPLS-AA17-LYV (SEQ ID NO: 6594), HVTKPTX (SEQ ID NO: 6443):APTKL (SEQ ID NO: 6369):KPLS-AA17-LYV (SEQ ID NO: 6594), YVPKPXX (SEQ ID NO: 6454):APTKL (SEQ ID NO: 6369):KPLS-AA17-LYV (SEQ ID NO: 6594), TVPKPXX (SEQ ID NO: 6453):APTQL (SEQ ID NO: 6372):KPLS-AA17-LYV (SEQ ID NO: 6594), AVPKAXX (SEQ ID NO: 6439):APTKL (SEQ ID NO: 6369):KPLS-AA17-LYV (SEQ ID NO: 6594), KVGKAXX (SEQ ID NO: 6446):VPTKL (SEQ ID NO: 6423):KPLS-AA17-LYV (SEQ ID NO: 6594), KASKAXX (SEQ ID NO: 6444):VPTKL (SEQ ID NO: 6423):KPLS-AA17-LYV (SEQ ID NO: 6594), GSAGPXX (SEQ ID NO: 6441):TPTKM (SEQ ID NO: 6388):KPLS-AA17-LYV (SEQ ID NO: 6594), AAPASXX (SEQ ID NO: 6436):VPARL (SEQ ID NO: 6401):KPLS-AA17-LYV (SEQ ID NO: 6594), STPPTXX (SEQ ID NO: 6452):VPTRL (SEQ ID NO: 6427):KPLS-AA17-LYV (SEQ ID NO: 6594), HVPKPXX (SEQ ID NO: 6442):APTKL (SEQ ID NO: 6369):KPLS-AA17-LYV (SEQ ID NO: 6594), ASAAPXX (SEQ ID NO: 6437):VPQAL (SEQ ID NO: 6410):KPLS-AA17-LYV (SEQ ID NO: 6594), ASASPXX (SEQ ID NO: 6438):VSODL (SEQ ID NO: 6429):KPLS-AA17-LYV (SEQ ID NO: 6594), ASASPXX (SEQ ID NO: 6438):VPQDL (SEQ ID NO: 6411):KPLS-AA17-LYV (SEQ ID NO: 6594), NDEGLEX (SEQ ID NO: 6447):VPTEE (SEQ ID NO: 6420):KPLS-AA17-LYV (SEQ ID NO: 6594), NDEGLEX (SEQ ID NO: 6447):VPTGQ (SEQ ID NO: 6422):KPLS-AA17-LYV (SEQ ID NO: 6594), SSVKXQP (SEQ ID NO: 6451):SRVHH (SEQ ID NO: 6382):KPLS-AA17-LYV (SEQ ID NO: 6594), RNVQXRP (SEQ ID NO: 6448):TQVQL (SEQ ID NO: 6393):KPLS-AA17-LYV (SEQ ID NO: 6594), KIPKAXX (SEQ ID NO: 6445):VPQEL (SEQ ID NO: 6412):EPLP-AA17-VYY (SEQ ID NO: 6592), GIPEPXX (SEQ ID NO: 6440):VPQKM (SEQ ID NO: 6414):EPLP-AA17-VYY (SEQ ID NO: 6592), SIPKAXX (SEQ ID NO: 6450):VPQEL (SEQ ID NO: 6412):EPLP-AA17-VYY (SEQ ID NO: 6592), HVTKPTX (SEQ ID NO: 6443):VPQKL (SEQ ID NO: 6413):EPLP-AA17-VYY (SEQ ID NO: 6592), YVPKPXX (SEQ ID NO: 6454):VPQKL (SEQ ID NO: 6413):EPLP-AA17-VYY (SEQ ID NO: 6592), TVPKPXX (SEQ ID NO: 6453):VPQQL (SEQ ID NO: 6416):EPLP-AA17-VYY (SEQ ID NO: 6592), AVPKAXX (SEQ ID NO: 6439):VPQKL (SEQ ID NO: 6413):EPLP-AA17-VYY (SEQ ID NO: 6592), KVGKAXX (SEQ ID NO: 6446):VPQKL (SEQ ID NO: 6413):EPLP-AA17-VYY (SEQ ID NO: 6592), KASKAXX (SEQ ID NO: 6444):VPQKL (SEQ ID NO: 6413):EPLP-AA17-VYY (SEQ ID NO: 6592), GSAGPXX (SEQ ID NO: 6441):VPQKM (SEQ ID NO: 6414):EPLP-AA17-VYY (SEQ ID NO: 6592), AAPASXX (SEQ ID NO: 6436):VPQRL (SEQ ID NO: 6417):EPLP-AA17-VYY (SEQ ID NO: 6592), STPPTXX (SEQ ID NO: 6452):VPQRL (SEQ ID NO: 6417):EPLP-AA17-VYY (SEQ ID NO: 6592), HVPKPXX (SEQ ID NO: 6442):VPQKL (SEQ ID NO: 6413):EPLP-AA17-VYY (SEQ ID NO: 6592), RVPSTXX (SEQ ID NO: 6449):VPQKT (SEQ ID NO: 6415):EPLP-AA17-VYY (SEQ ID NO: 6592), ASASPXX (SEQ ID NO: 6438):VPQDL (SEQ ID NO: 6411):EPLP-AA17-VYY (SEQ ID NO: 6592), KIPKAXX (SEQ ID NO: 6445):VPTEL (SEQ ID NO: 6421):EPLP-AA17-VYY (SEQ ID NO: 6592), GIPEPXX (SEQ ID NO: 6440):VPEKM (SEQ ID NO: 6406):EPLP-AA17-VYY (SEQ ID NO: 6592), SIPKAXX (SEQ ID NO: 6450):VPTEL (SEQ ID NO: 6421):EPLP-AA17-VYY (SEQ ID NO: 6592), HVTKPTX (SEQ ID NO: 6443):APTKL (SEQ ID NO: 6369):EPLP-AA17-VYY (SEQ ID NO: 6592), YVPKPXX (SEQ ID NO: 6454):APTKL (SEQ ID NO: 6369):EPLP-AA17-VYY (SEQ ID NO: 6592), TVPKPXX (SEQ ID NO: 6453):APTQL (SEQ ID NO: 6372):EPLP-AA17-VYY (SEQ ID NO: 6592), AVPKAXX (SEQ ID NO: 6439):APTKL (SEQ ID NO: 6369):EPLP-AA17-VYY (SEQ ID NO: 6592), KVGKAXX (SEQ ID NO: 6446):VPTKL (SEQ ID NO: 6423):EPLP-AA17-VYY (SEQ ID NO: 6592), KASKAXX (SEQ ID NO: 6444):VPTKL (SEQ ID NO: 6423):EPLP-AA17-VYY (SEQ ID NO: 6592), GSAGPXX (SEQ ID NO: 6441):TPTKM (SEQ ID NO: 6388):EPLP-AA17-VYY (SEQ ID NO: 6592), AAPASXX (SEQ ID NO: 6436):VPARL (SEQ ID NO: 6401):EPLP-AA17-VYY (SEQ ID NO: 6592), STPPTXX (SEQ ID NO: 6452):VPTRL (SEQ ID NO: 6427):EPLP-AA17-VYY (SEQ ID NO: 6592), HVPKPXX (SEQ ID NO: 6442):APTKL (SEQ ID NO: 6369):EPLP-AA17-VYY (SEQ ID NO: 6592), RVPSTXX (SEQ ID NO: 6449):APVKT (SEQ ID NO: 6379):EPLP-AA17-VYY (SEQ ID NO: 6592), ASASPXX (SEQ ID NO: 6438):VSODL (SEQ ID NO: 6429):EPLP-AA17-VYY (SEQ ID NO: 6592), NDEGLEX (SEQ ID NO: 6447):VPTEE (SEQ ID NO: 6420):EPLP-AA17-VYY (SEQ ID NO: 6592), NDEGLEX (SEQ ID NO: 6447):VPTGQ (SEQ ID NO: 6422):EPLP-AA17-VYY (SEQ ID NO: 6592), SSVKXQP (SEQ ID NO: 6451):SRVHH (SEQ ID NO: 6382):EPLP-AA17-VYY (SEQ ID NO: 6592), RNVQXRP (SEQ ID NO: 6448):TQVQL (SEQ ID NO: 6393):EPLP-AA17-VYY (SEQ ID NO: 6592), KIPKAXX (SEQ ID NO: 6445):VSQEL (SEQ ID NO: 6430):EPLT-AA17-LYY (SEQ ID NO: 6593), GIPEPXX (SEQ ID NO: 6440):VSQKM (SEQ ID NO: 6432):EPLT-AA17-LYY (SEQ ID NO: 6593), SIPKAXX (SEQ ID NO: 6450):VSQEL (SEQ ID NO: 6430):EPLT-AA17-LYY (SEQ ID NO: 6593), HVTKPTX (SEQ ID NO: 6443):VSQKL (SEQ ID NO: 6431):EPLT-AA17-LYY (SEQ ID NO: 6593), YVPKPXX (SEQ ID NO: 6454):VSQKL (SEQ ID NO: 6431):EPLT-AA17-LYY (SEQ ID NO: 6593), TVPKPXX (SEQ ID NO: 6453):VSQQL (SEQ ID NO: 6434):EPLT-AA17-LYY (SEQ ID NO: 6593), AVPKAXX (SEQ ID NO: 6439):VSQKL (SEQ ID NO: 6431):EPLT-AA17-LYY (SEQ ID NO: 6593), KVGKAXX (SEQ ID NO: 6446):VSQKL (SEQ ID NO: 6431):EPLT-AA17-LYY (SEQ ID NO: 6593), KASKAXX (SEQ ID NO: 6444):VSQKL (SEQ ID NO: 6431):EPLT-AA17-LYY (SEQ ID NO: 6593), GSAGPXX (SEQ ID NO: 6441):VSQKM (SEQ ID NO: 6432):EPLT-AA17-LYY (SEQ ID NO: 6593), AAPASXX (SEQ ID NO: 6436):VSQRL (SEQ ID NO: 6435):EPLT-AA17-LYY (SEQ ID NO: 6593), STPPTXX (SEQ ID NO: 6452):VSQRL (SEQ ID NO: 6435):EPLT-AA17-LYY (SEQ ID NO: 6593), HVPKPXX (SEQ ID NO: 6442):VSQKL (SEQ ID NO: 6431):EPLT-AA17-LYY (SEQ ID NO: 6593), RVPSTXX (SEQ ID NO: 6449):VSQKT (SEQ ID NO: 6433):EPLT-AA17-LYY (SEQ ID NO: 6593), ASAAPXX (SEQ ID NO: 6437):VSQAL (SEQ ID NO: 6428):EPLT-AA17-LYY (SEQ ID NO: 6593), ASASPXX (SEQ ID NO: 6438):VSODL (SEQ ID NO: 6429):EPLT-AA17-LYY (SEQ ID NO: 6593), KIPKAXX (SEQ ID NO: 6445):VPTEL (SEQ ID NO: 6421):EPLT-AA17-LYY (SEQ ID NO: 6593), GIPEPXX (SEQ ID NO: 6440):VPEKM (SEQ ID NO: 6406):EPLT-AA17-LYY (SEQ ID NO: 6593), SIPKAXX (SEQ ID NO: 6450):VPTEL (SEQ ID NO: 6421):EPLT-AA17-LYY (SEQ ID NO: 6593), HVTKPTX (SEQ ID NO: 6443):APTKL (SEQ ID NO: 6369):EPLT-AA17-LYY (SEQ ID NO: 6593), YVPKPXX (SEQ ID NO: 6454):APTKL (SEQ ID NO: 6369):EPLT-AA17-LYY (SEQ ID NO: 6593), TVPKPXX (SEQ ID NO: 6453):APTQL (SEQ ID NO: 6372):EPLT-AA17-LYY (SEQ ID NO: 6593), AVPKAXX (SEQ ID NO: 6439):APTKL (SEQ ID NO: 6369):EPLT-AA17-LYY (SEQ ID NO: 6593), KVGKAXX (SEQ ID NO: 6446):VPTKL (SEQ ID NO: 6423):EPLT-AA17-LYY (SEQ ID NO: 6593), KASKAXX (SEQ ID NO: 6444):VPTKL (SEQ ID NO: 6423):EPLT-AA17-LYY (SEQ ID NO: 6593), GSAGPXX (SEQ ID NO: 6441):TPTKM (SEQ ID NO: 6388):EPLT-AA17-LYY (SEQ ID NO: 6593), AAPASXX (SEQ ID NO: 6436):VPARL (SEQ ID NO: 6401):EPLT-AA17-LYY (SEQ ID NO: 6593), STPPTXX (SEQ ID NO: 6452):VPTRL (SEQ ID NO: 6427):EPLT-AA17-LYY (SEQ ID NO: 6593), HVPKPXX (SEQ ID NO: 6442):APTKL (SEQ ID NO: 6369):EPLT-AA17-LYY (SEQ ID NO: 6593), RVPSTXX (SEQ ID NO: 6449):APVKT (SEQ ID NO: 6379):EPLT-AA17-LYY (SEQ ID NO: 6593), ASAAPXX (SEQ ID NO: 6437):VPQAL (SEQ ID NO: 6410):EPLT-AA17-LYY (SEQ ID NO: 6593), NDEGLEX (SEQ ID NO: 6447):VPTEE (SEQ ID NO: 6420):EPLT-AA17-LYY (SEQ ID NO: 6593), NDEGLEX (SEQ ID NO: 6447):VPTGQ (SEQ ID NO: 6422):EPLT-AA17-LYY (SEQ ID NO: 6593), SSVKXQP (SEQ ID NO: 6451):SRVHH (SEQ ID NO: 6382):EPLT-AA17-LYY (SEQ ID NO: 6593), RNVQXRP (SEQ ID NO: 6448):TQVQL (SEQ ID NO: 6393):EPLT-AA17-LYY (SEQ ID NO: 6593), KIPKAXX (SEQ ID NO: 6445):VPQEL (SEQ ID NO: 6412):EPLT-AA17-LYY (SEQ ID NO: 6593), GIPEPXX (SEQ ID NO: 6440):VPQKM (SEQ ID NO: 6414):EPLT-AA17-LYY (SEQ ID NO: 6593), SIPKAXX (SEQ ID NO: 6450):VPQEL (SEQ ID NO: 6412):EPLT-AA17-LYY (SEQ ID NO: 6593), HVTKPTX (SEQ ID NO: 6443):VPQKL (SEQ ID NO: 6413):EPLT-AA17-LYY (SEQ ID NO: 6593), YVPKPXX (SEQ ID NO: 6454):VPQKL (SEQ ID NO: 6413):EPLT-AA17-LYY (SEQ ID NO: 6593), TVPKPXX (SEQ ID NO: 6453):VPQQL (SEQ ID NO: 6416):EPLT-AA17-LYY (SEQ ID NO: 6593), AVPKAXX (SEQ ID NO: 6439):VPQKL (SEQ ID NO: 6413):EPLT-AA17-LYY (SEQ ID NO: 6593), KVGKAXX (SEQ ID NO: 6446):VPQKL (SEQ ID NO: 6413):EPLT-AA17-LYY (SEQ ID NO: 6593), KASKAXX (SEQ ID NO: 6444):VPQKL (SEQ ID NO: 6413):EPLT-AA17-LYY (SEQ ID NO: 6593), GSAGPXX (SEQ ID NO: 6441):VPQKM (SEQ ID NO: 6414):EPLT-AA17-LYY (SEQ ID NO: 6593), AAPASXX (SEQ ID NO: 6436):VPQRL (SEQ ID NO: 6417):EPLT-AA17-LYY (SEQ ID NO: 6593), STPPTXX (SEQ ID NO: 6452):VPQRL (SEQ ID NO: 6417):EPLT-AA17-LYY (SEQ ID NO: 6593), HVPKPXX (SEQ ID NO: 6442):VPQKL (SEQ ID NO: 6413):EPLT-AA17-LYY (SEQ ID NO: 6593), RVPSTXX (SEQ ID NO: 6449):VPQKT (SEQ ID NO: 6415):EPLT-AA17-LYY (SEQ ID NO: 6593), ASASPXX (SEQ ID NO: 6438):VPQDL (SEQ ID NO: 6411):EPLT-AA17-LYY (SEQ ID NO: 6593), NDEGLEX (SEQ ID NO: 6447):VPTGQ (SEQ ID NO: 6422):SNIT-AA17-QIM (SEQ ID NO: 6600), GIPEPXX (SEQ ID NO: 6440):VPEKM (SEQ ID NO: 6406):SNIT-AA17-QIM (SEQ ID NO: 6600), HVTKPTX (SEQ ID NO: 6443):APTKL (SEQ ID NO: 6369):SNIT-AA17-QIM (SEQ ID NO: 6600), YVPKPXX (SEQ ID NO: 6454):APTKL (SEQ ID NO: 6369):SNIT-AA17-QIM (SEQ ID NO: 6600), TVPKPXX (SEQ ID NO: 6453):APTQL (SEQ ID NO: 6372):SNIT-AA17-QIM (SEQ ID NO: 6600), AVPKAXX (SEQ ID NO: 6439):APTKL (SEQ ID NO: 6369):SNIT-AA17-QIM (SEQ ID NO: 6600), GSAGPXX (SEQ ID NO: 6441):TPTKM (SEQ ID NO: 6388):SNIT-AA17-QIM (SEQ ID NO: 6600), AAPASXX (SEQ ID NO: 6436):VPARL (SEQ ID NO: 6401):SNIT-AA17-QIM (SEQ ID NO: 6600), HVPKPXX (SEQ ID NO: 6442):APTKL (SEQ ID NO: 6369):SNIT-AA17-QIM (SEQ ID NO: 6600), RVPSTXX (SEQ ID NO: 6449):APVKT (SEQ ID NO: 6379):SNIT-AA17-QIM (SEQ ID NO: 6600), ASAAPXX (SEQ ID NO: 6437):VPQAL (SEQ ID NO: 6410):SNIT-AA17-QIM (SEQ ID NO: 6600), ASASPXX (SEQ ID NO: 6438):VSODL (SEQ ID NO: 6429):SNIT-AA17-QIM (SEQ ID NO: 6600), ASASPXX (SEQ ID NO: 6438):VPQDL (SEQ ID NO: 6411):SNIT-AA17-QIM (SEQ ID NO: 6600), SSVKXQP (SEQ ID NO: 6451):SRVHH (SEQ ID NO: 6382):SNIT-AA17-QIM (SEQ ID NO: 6600), RNVQXRP (SEQ ID NO: 6448):TQVQL (SEQ ID NO: 6393):SNIT-AA17-QIM (SEQ ID NO: 6600), RNVQXRP (SEQ ID NO: 6448):SRVQL (SEQ ID NO: 6383):RSVK-AA17-AKV (SEQ ID NO: 6597), KIPKAXX (SEQ ID NO: 6445):VPTEL (SEQ ID NO: 6421):RSVK-AA17-AKV (SEQ ID NO: 6597), GIPEPXX (SEQ ID NO: 6440):VPEKM (SEQ ID NO: 6406):RSVK-AA17-AKV (SEQ ID NO: 6597), SIPKAXX (SEQ ID NO: 6450):VPTEL (SEQ ID NO: 6421):RSVK-AA17-AKV (SEQ ID NO: 6597), HVTKPTX (SEQ ID NO: 6443):APTKL (SEQ ID NO: 6369):RSVK-AA17-AKV (SEQ ID NO: 6597), YVPKPXX (SEQ ID NO: 6454):APTKL (SEQ ID NO: 6369):RSVK-AA17-AKV (SEQ ID NO: 6597), TVPKPXX (SEQ ID NO: 6453):APTQL (SEQ ID NO: 6372):RSVK-AA17-AKV (SEQ ID NO: 6597), AVPKAXX (SEQ ID NO: 6439):APTKL (SEQ ID NO: 6369):RSVK-AA17-AKV (SEQ ID NO: 6597), KVGKAXX (SEQ ID NO: 6446):VPTKL (SEQ ID NO: 6423):RSVK-AA17-AKV (SEQ ID NO: 6597), KASKAXX (SEQ ID NO: 6444):VPTKL (SEQ ID NO: 6423):RSVK-AA17-AKV (SEQ ID NO: 6597), GSAGPXX (SEQ ID NO: 6441):TPTKM (SEQ ID NO: 6388):RSVK-AA17-AKV (SEQ ID NO: 6597), AAPASXX (SEQ ID NO: 6436):VPARL (SEQ ID NO: 6401):RSVK-AA17-AKV (SEQ ID NO: 6597), STPPTXX (SEQ ID NO: 6452):VPTRL (SEQ ID NO: 6427):RSVK-AA17-AKV (SEQ ID NO: 6597), HVPKPXX (SEQ ID NO: 6442):APTKL (SEQ ID NO: 6369):RSVK-AA17-AKV (SEQ ID NO: 6597), RVPSTXX (SEQ ID NO: 6449):APVKT (SEQ ID NO: 6379):RSVK-AA17-AKV (SEQ ID NO: 6597), ASAAPXX (SEQ ID NO: 6437):VPQAL (SEQ ID NO: 6410):RSVK-AA17-AKV (SEQ ID NO: 6597), ASASPXX (SEQ ID NO: 6438):VSODL (SEQ ID NO: 6429):RSVK-AA17-AKV (SEQ ID NO: 6597), ASASPXX (SEQ ID NO: 6438):VPQDL (SEQ ID NO: 6411):RSVK-AA17-AKV (SEQ ID NO: 6597), NDEGLEX (SEQ ID NO: 6447):VPTEE (SEQ ID NO: 6420):RSVK-AA17-AKV (SEQ ID NO: 6597), NDEGLEX (SEQ ID NO: 6447):VPTGQ (SEQ ID NO: 6422):RSVK-AA17-AKV (SEQ ID NO: 6597), RNVQXRP (SEQ ID NO: 6448):TQVQL (SEQ ID NO: 6393):RSVK-AA17-AKV (SEQ ID NO: 6597), SSVKXQP (SEQ ID NO: 6451):TQVHH (SEQ ID NO: 6392):RPVQ-AA17-RKI (SEQ ID NO: 6596), KIPKAXX (SEQ ID NO: 6445):VPTEL (SEQ ID NO: 6421):RPVQ-AA17-RKI (SEQ ID NO: 6596), GIPEPXX (SEQ ID NO: 6440):VPEKM (SEQ ID NO: 6406):RPVQ-AA17-RKI (SEQ ID NO: 6596), SIPKAXX (SEQ ID NO: 6450):VPTEL (SEQ ID NO: 6421):RPVQ-AA17-RKI (SEQ ID NO: 6596), HVTKPTX (SEQ ID NO: 6443):APTKL (SEQ ID NO: 6369):RPVQ-AA17-RKI (SEQ ID NO: 6596), YVPKPXX (SEQ ID NO: 6454):APTKL (SEQ ID NO: 6369):RPVQ-AA17-RKI (SEQ ID NO: 6596), TVPKPXX (SEQ ID NO: 6453):APTQL (SEQ ID NO: 6372):RPVQ-AA17-RKI (SEQ ID NO: 6596), AVPKAXX (SEQ ID NO: 6439):APTKL (SEQ ID NO: 6369):RPVQ-AA17-RKI (SEQ ID NO: 6596), KVGKAXX (SEQ ID NO: 6446):VPTKL (SEQ ID NO: 6423):RPVQ-AA17-RKI (SEQ ID NO: 6596), KASKAXX (SEQ ID NO: 6444):VPTKL (SEQ ID NO: 6423):RPVQ-AA17-RKI (SEQ ID NO: 6596), GSAGPXX (SEQ ID NO: 6441):TPTKM (SEQ ID NO: 6388):RPVQ-AA17-RKI (SEQ ID NO: 6596), AAPASXX (SEQ ID NO: 6436):VPARL (SEQ ID NO: 6401):RPVQ-AA17-RKI (SEQ ID NO: 6596), STPPTXX (SEQ ID NO: 6452):VPTRL (SEQ ID NO: 6427):RPVQ-AA17-RKI (SEQ ID NO: 6596), HVPKPXX (SEQ ID NO: 6442):APTKL (SEQ ID NO: 6369):RPVQ-AA17-RKI (SEQ ID NO: 6596), RVPSTXX (SEQ ID NO: 6449):APVKT (SEQ ID NO: 6379):RPVQ-AA17-RKI (SEQ ID NO: 6596), ASAAPXX (SEQ ID NO: 6437):VPQAL (SEQ ID NO: 6410):RPVQ-AA17-RKI (SEQ ID NO: 6596), ASASPXX (SEQ ID NO: 6438):VSODL (SEQ ID NO: 6429):RPVQ-AA17-RKI (SEQ ID NO: 6596), ASASPXX (SEQ ID NO: 6438):VPQDL (SEQ ID NO: 6411):RPVQ-AA17-RKI (SEQ ID NO: 6596), NDEGLEX (SEQ ID NO: 6447):VPTEE (SEQ ID NO: 6420):RPVQ-AA17-RKI (SEQ ID NO: 6596), NDEGLEX (SEQ ID NO: 6447):VPTGQ (SEQ ID NO: 6422):RPVQ-AA17-RKI (SEQ ID NO: 6596) and SSVKXQP (SEQ ID NO: 6451):SRVHH (SEQ ID NO: 6382):RPVQ-AA17-RKI (SEQ ID NO: 6596); and wherein AA¹⁷ is selected from the group consisting of G, A, V, L, I, P, F, M, W, T and S (in particular is selected from the group consisting of M, I, L, V and T).

[0316] In certain embodiments, PEP11 is a peptide with 3 amino acids of general formula AA¹⁸-AA¹⁹-AA²⁰; wherein AA¹⁸ is selected from the group consisting of L, V, Q, A and R; wherein AA¹⁹ is selected from the group consisting of F, W, H, Y, I and K; wherein AA²⁰ is selected from the group consisting of L, F, Y, K, I, V and M. In one particular example, PEP11 is selected from the group consisting of LYL, LFF, LYF, LYY, LYK, LYI, LFI, LYV, VYY, QIM, AKV and RKI.

[0317] In certain embodiments, PEP1 is selected from the group consisting of SAIS (SEQ ID NO: 6360), SSLS (SEQ ID NO: 6365), NAIS (SEQ ID NO: 6357), SATS (SEQ ID NO: 6361), SPIS (SEQ ID NO: 6364), EPIS (SEQ ID NO: 6353), SPIN (SEQ ID NO: 6363), KPLS (SEQ ID NO: 6356), EPLP (SEQ ID NO: 6354), EPLT (SEQ ID NO: 6355), SNIT (SEQ ID NO: 6362), RSVK (SEQ ID NO: 6359) and RPVQ (SEQ ID NO: 6358); PEP11 is selected from the group consisting of LYL, LFF, LYF, LYY, LYK, LYI, LFI, LYV, VYY, QIM, AKV and RKI; and the pair PEP1:PEP11 is selected from the group consisting of SAIS (SEQ ID NO: 6360):LYL, SSLS (SEQ ID NO: 6365):LFF, NAIS (SEQ ID NO: 6357):LYF, SATS (SEQ ID NO: 6361):LYY, SPIS (SEQ ID NO: 6364):LYK, SPIS (SEQ ID NO: 6364):LYI, SPIS (SEQ ID NO: 6364):LFI, EPIS (SEQ ID NO: 6353):LYL, SPIN (SEQ ID NO: 6363):LYF, KPLS (SEQ ID NO: 6356):LYV, EPLP (SEQ ID NO: 6354):VYY, EPLT (SEQ ID NO: 6355):LYY, SNIT (SEQ ID NO: 6362):QIM, RSVK (SEQ ID NO: 6359):AKV and RPVQ (SEQ ID NO: 6358):RKI.

[0318] In one aspect, the present disclosure provides a GFR-binding compound, wherein said GFR-binding compound is a peptide, a variant or analog thereof, or a peptidomimetic as defined herein, with (comprising, or exclusively consisting of, or constituted of) between 8 and 30 (in particular between 8-25 or between 8-22, more particularly between 18-22, even more particularly between 19-21 or 20) amino acids, having the following general formula (III) (hereinafter may also be referred to as compound (III) or peptide (III)):

AA¹-AA²-AA³-AA⁴-AA⁵-AA⁶-AA⁷-AA⁸-AA⁹-AA¹⁰-AA¹¹-AA¹²-AA¹³-AA¹⁴-AA¹⁵-AA¹⁶-AA¹⁷-AA¹⁸-AA¹⁹-AA²⁰ (III)

[0319] wherein AA¹-AA²-AA³-AA⁴-AA⁵-AA⁶-AA⁷ (SEQ ID NO: 6606) is PEP7 as defined herein; wherein AA¹³-AA¹⁴-AA¹⁵-AA¹⁶-AA¹⁷-AA¹⁸-AA¹⁹-AA²⁰ is PEP12 as defined herein; wherein AA⁸-AA⁹-AA¹⁰ is PEP3 as defined herein; wherein AA¹¹ and AA¹² are as defined herein; wherein AA¹ may be an N-terminal amino acid or a C-terminal amino acid; wherein AA²⁰ may be an N-terminal amino acid or a C-terminal amino acid; and wherein the RMSD is 2.45 Å or less.

[0320] In one example, said GFR-binding compound is a synthetic molecule as defined herein in the definition section.

[0321] In one particular example, said GFR-binding compound is a synthetic peptide, or a variant or analog thereof, or a peptidomimetic.

[0322] In one most particular example, said GFR-binding compound is a synthetic peptide.

[0323] In one example, length of said GFR-binding compound, in solution, such as in a physiologically acceptable solvent such as water or PBS, is comprised between about 6 and about 20 nm, preferably between about 6 and about 16 nm, as determined using the standard «3D» procedure described above.

[0324] In one particular example, said GFR-binding compounds may be any one or a plurality of of peptides of SEQ ID NO: 1 to 1085 and 1143 to 6352.

[0325] Bone

[0326] Certain embodiments of the invention are particularly useful for inducing differentiation of mensenchymal or progenitor stem cells from the bone cell lineage, regenerating bone tissues, repairing bone and protecting from osteoporosis.

[0327] In certain embodiments useful for inducing differentiation of mensenchymal or progenitor stem cells from the bone cell lineage, regenerating bone tissues, repairing bone and protecting from osteoporosis, PEP1 is selected from the group consisting of SAIS (SEQ ID NO: 6360), NAIS (SEQ ID NO: 6357), SATS (SEQ ID NO: 6361) and SPIS (SEQ ID NO: 6364).

[0328] In certain embodiments useful for inducing differentiation of mensenchymal or progenitor stem cells from the bone cell lineage, regenerating bone tissues, repairing bone and protecting from osteoporosis, PEP3 is selected from the group consisting of VPT, APT, VPQ, VSO and TQV.

[0329] In certain embodiments useful for inducing differentiation of mensenchymal or progenitor stem cells from the bone cell lineage, regenerating bone tissues, repairing bone and protecting from osteoporosis, PEP5 is a peptide of general formula PEP3-AA¹¹-AA¹²; wherein PEP3 is selected from the group consisting of VPT, APT, VPQ, VSO and TQV; wherein AA¹¹ is selected from the group consisting of E, K, Q, R, A, D, G and H, in particular E, K, Q, A and D; wherein AA¹² is selected from the group consisting of L, M, T, E, Q and H, in particular L. In one particular example, PEP5 is selected from the group consisting of VPTEL (SEQ ID NO: 6421), APTKL (SEQ ID NO: 6369), APTQL (SEQ ID NO: 6372), VPTKL (SEQ ID NO: 6423), VPQAL (SEQ ID NO: 6410), VSODL (SEQ ID NO: 6429), VPQDL (SEQ ID NO: 6411) and TQVQL (SEQ ID NO: 6393).

[0330] In certain embodiments useful for inducing differentiation of mensenchymal or progenitor stem cells from the bone cell lineage, regenerating bone tissues, repairing bone and protecting from osteoporosis, PEP7 is an amino acid or a peptide with between two and seven amino acids of general formula AA¹-AA²-AA³-AA⁴-AA⁵-AA⁶-AA⁷ (SEQ ID NO: 6606); wherein AA¹, AA², AA³, AA⁴, and AA⁵ are independently absent or AA¹ as defined herein; wherein AA⁶ is absent or selected from the group consisting of S, T, C, E, Q, P and R, preferably C, S, T or R; wherein AA⁷ is absent or is selected from the group consisting of S, T, C, E, Q, P and R, preferably is selected from the group consisting of C, S and P; and wherein at least one of AA¹, AA², AA³, AA⁴, AA⁵, AA⁶ or AA⁷ is not absent. In one particular example, PEP7 is selected from the group consisting of KIPKAXX (SEQ ID NO: 6445), SIPKAXX (SEQ ID NO: 6450), HVTKPTX (SEQ ID NO: 6443), YVPKPXX (SEQ ID NO: 6454), TVPKPXX (SEQ ID NO: 6453), AVPKAXX (SEQ ID NO: 6439), KVGKAXX (SEQ ID NO: 6446), ASAAPXX (SEQ ID NO: 6437), ASASPXX (SEQ ID NO: 6438) and RNVQXRP (SEQ ID NO: 6448).

[0331] In certain embodiments useful for inducing differentiation of mensenchymal or progenitor stem cells from the bone cell lineage, regenerating bone tissues, repairing bone and protecting from osteoporosis, PEP9 is a peptide of general formula AA¹-AA²-AA³-AA⁴-AA⁵-AA⁶-AA⁷-PEP5; wherein PEP5 is a peptide of formula PEP3-AA¹¹-AA¹²; wherein PEP3 is selected from the group consisting of VPT, APT, VPQ, VSO and TQV; wherein AA¹¹ is selected from the group consisting of E, K, Q, R, A, D, G and H, in particular E, K, Q, A and D; wherein AA¹² is selected from the group consisting of L, M, T, E, Q and H, in particular L; wherein AA¹, AA², AA³, AA⁴, and AA⁵ are independently absent or AA¹ as defined herein; wherein AA⁶ is absent or selected from the group consisting of S, T, C, E, Q, P and R, preferably C, S, T or R; wherein AA⁷ is selected from the group consisting of S, T, C, E, Q, P and R, preferably is selected from the group consisting of C, S and P. In one particular example, PEP9 is selected from the group consisting of KIPKAXXVPTEL (SEQ ID NO: 6535), SIPKAXXVPTEL (SEQ ID NO: 6563), HVTKPTXAPTKL (SEQ ID NO: 6511), YVPKPXXAPTKL (SEQ ID NO: 6583), TVPKPXXAPTQL (SEQ ID NO: 6575), AVPKAXXAPTKL (SEQ ID NO: 6479), KVGKAXXVPTKL (SEQ ID NO: 6543), ASAAPXXVPQAL (SEQ ID NO: 6468), ASASPXXVSQDL (SEQ ID NO: 6478), ASASPXXVPQDL (SEQ ID NO: 6476) and RNVQXRPTQVQL (SEQ ID NO: 6548).

[0332] In certain embodiments useful for inducing differentiation of mensenchymal or progenitor stem cells from the bone cell lineage, regenerating bone tissues, repairing bone and protecting from osteoporosis, PEP12 is a peptide of general formula PEP1-AA¹⁷-PEP11; wherein AA¹⁷ is selected from the group consisting of G, A, V, L, I, P, F, M, W, T and S (in particular is selected from the group consisting of M, I, L, V and T); wherein PEP1 is selected from the group consisting of SAIS (SEQ ID NO: 6360), NAIS (SEQ ID NO: 6357), SATS (SEQ ID NO: 6361) and SPIS (SEQ ID NO: 6364).

[0333] In certain embodiments useful for inducing differentiation of mensenchymal or progenitor stem cells from the bone cell lineage, regenerating bone tissues, repairing bone and protecting from osteoporosis, PEP11 is a peptide with 3 amino acids of general formula AA¹⁸-AA¹⁹-AA²⁰; wherein AA¹⁸ is selected from the group consisting of L, V, Q, A and R, in particular is L; wherein AA¹⁹ is selected from the group consisting of F, W, H and Y (in particular is an aromatic, polar amino acid such as Y); wherein AA² is selected from the group consisting of L, F, Y, K, I, V and M, in particular is selected from the group consisting of L, F, Y, and K. In one particular example, PEP11 is selected from the group consisting of LYL, LYF, LYY and LYK.

[0334] In certain embodiments useful for inducing differentiation of mensenchymal or progenitor stem cells from the bone cell lineage, regenerating bone tissues, repairing bone and protecting from osteoporosis, PEP1 is selected from the group consisting of SAIS (SEQ ID NO: 6360), NAIS (SEQ ID NO: 6357), SATS (SEQ ID NO: 6361) and SPIS (SEQ ID NO: 6364); PEP11 is selected from the group consisting of LYL, LFF, LYF, LYY, LYK, LYI, LFI, LYV, VYY, QIM, AKV and RKI; and the pair PEP1:PEP11 is selected from the group consisting of SAIS (SEQ ID NO: 6360):LYL, NAIS (SEQ ID NO: 6357):LYF, SATS (SEQ ID NO: 6361):LYY and SPIS (SEQ ID NO: 6364):LYK.

[0335] The definitions of “PEP” pairs and triplets e.g. PEP3:PEP1, PEP5:PEP12, or PEP7:PEP5:PEP1, most particularly useful for inducing differentiation of mensenchymal or progenitor stem cells from the bone cell lineage, regenerating bone tissues, repairing bone and protecting from osteoporosis, are as already defined herein to the extent that PEP1, PEP3, PEP5, PEP7, PEP9, PEP11 and PEP12 are particularly useful for these applications as defined in the present bone section.

[0336] In certain embodiments useful for inducing differentiation of mensenchymal or progenitor stem cells from the bone cell lineage, regenerating bone tissues, repairing bone and protecting from osteoporosis, said GFR-binding compound is a synthetic molecule as defined herein in the definition section.

[0337] In certain embodiments useful for inducing differentiation of mensenchymal or progenitor stem cells from the bone cell lineage, regenerating bone tissues, repairing bone and protecting from osteoporosis, said GFR-binding compound is a synthetic peptide, or a variant or analog thereof, or a peptidomimetic.

[0338] Cartilage

[0339] Certain embodiments of the invention are particularly useful for inducing differentiation of mensenchymal or progenitor stem cells from the cartilage cell lineage, regenerating cartilage tissues, repairing cartilage and protecting from, for instance, osteoarthritis, costochondritis, Herniation, achondroplasia or relapsing polychondritis.

[0340] In certain embodiments useful for inducing differentiation of mensenchymal or progenitor stem cells from the cartilage cell lineage, regenerating cartilage tissues, repairing cartilage and protecting from, for instance, osteoarthritis, costochondritis, Herniation, achondroplasia or relapsing polychondritis, PEP1 is selected from the group consisting of SAIS (SEQ ID NO: 6360), NAIS (SEQ ID NO: 6357), SPIS (SEQ ID NO: 6364), EPLP (SEQ ID NO: 6354) and EPLT (SEQ ID NO: 6355).

[0341] In certain embodiments useful for inducing differentiation of mensenchymal or progenitor stem cells from the cartilage cell lineage, regenerating cartilage tissues, repairing cartilage and protecting from, for instance, osteoarthritis, costochondritis, Herniation, achondroplasia or relapsing polychondritis, PEP3 is selected from the group consisting of VPT, APT, VPQ and VSO.

[0342] In certain embodiments useful for inducing differentiation of mensenchymal or progenitor stem cells from the cartilage cell lineage, regenerating cartilage tissues, repairing cartilage and protecting from, for instance, osteoarthritis, costochondritis, Herniation, achondroplasia or relapsing polychondritis, PEP5 is a peptide of general formula PEP3-AA¹¹-AA¹²; wherein PEP3 is selected from the group consisting of VPT, APT, VPQ and VSQ; wherein AA¹¹ is selected from the group consisting of E, K, Q, R, A, D, G and H, in particular E, K, Q, R, A and D; wherein AA¹² is selected from the group consisting of L, M, T, E, Q and H, in particular is L In one particular example, PEP5 is selected from the group consisting of VPTEL (SEQ ID NO: 6421), APTKL (SEQ ID NO: 6369), APTQL (SEQ ID NO: 6372), VPTRL (SEQ ID NO: 6427), VPQAL (SEQ ID NO: 6410), VSODL (SEQ ID NO: 6429) and VPQDL (SEQ ID NO: 6411).

[0343] In certain embodiments useful for inducing differentiation of mensenchymal or progenitor stem cells from the cartilage cell lineage, regenerating cartilage tissues, repairing cartilage and protecting from, for instance, osteoarthritis, costochondritis, Herniation, achondroplasia or relapsing polychondritis, PEP7 is an amino acid or a peptide with between two and seven amino acids of general formula AA¹-AA²-AA³-AA⁴-AA⁵-AA⁶-AA⁷ (SEQ ID NO: 6606); wherein AA¹, AA², AA³, AA⁴, and AA⁵ are independently absent or AA¹ as defined herein; wherein AA⁶ is absent or selected from the group consisting of S, T, C, E, Q, P and R, preferably is S, C or T; wherein AA⁷ is absent or is selected from the group consisting of S, T, C, E, Q, P and R, preferably is S or C; and wherein at least one of AA, AA², AA³, AA⁴, AA⁵, AA⁶ or AA⁷ is not absent. In one particular example, PEP7 is selected from the group consisting of KIPKAXX (SEQ ID NO: 6445), SIPKAXX (SEQ ID NO: 6450), HVTKPTX (SEQ ID NO: 6443), YVPKPXX (SEQ ID NO: 6454), TVPKPXX (SEQ ID NO: 6453), STPPTXX (SEQ ID NO: 6452), ASAAPXX (SEQ ID NO: 6437) and ASASPXX (SEQ ID NO: 6438).

[0344] In certain embodiments useful for inducing differentiation of mensenchymal or progenitor stem cells from the cartilage cell lineage, regenerating cartilage tissues, repairing cartilage and protecting from, for instance, osteoarthritis, costochondritis, Herniation, achondroplasia or relapsing polychondritis, PEP9 is a peptide of general formula AA¹-AA²-AA³-AA⁴-AA⁵-AA⁶-AA⁷-PEP5; wherein PEP5 is a peptide of formula PEP3-AA¹¹-AA¹²; wherein PEP3 is selected from the group consisting of VPT, APT, VPQ and VSO; wherein AA¹¹ is selected from the group consisting of E, K, Q, R, A, D, G and H, in particular E, K, Q, R, A and D; wherein AA¹² is selected from the group consisting of L, M, T, E, Q and H, in particular is L; wherein AA¹, AA², AA³, AA⁴, and AA⁵ are independently absent or AA¹ as defined herein; wherein AA⁶ is absent or selected from the group consisting of S, T, C, E, Q, P and R, preferably is S, C or T; wherein AA⁷ is selected from the group consisting of S, T, C, E, Q, P and R, preferably is S or C. In one particular example, PEP9 is selected from the group consisting of KIPKAXXVPTEL (SEQ ID NO: 6535), SIPKAXXVPTEL (SEQ ID NO: 6563), HVTKPTXAPTKL (SEQ ID NO: 6511), YVPKPXXAPTKL (SEQ ID NO: 6583), TVPKPXXAPTQL (SEQ ID NO: 6575), STPPTXXVPTRL (SEQ ID NO: 6573), ASAAPXXVPQAL (SEQ ID NO: 6468), ASASPXXVSQDL (SEQ ID NO: 6478) and ASASPXXVPQDL (SEQ ID NO: 6476).

[0345] In certain embodiments useful for inducing differentiation of mensenchymal or progenitor stem cells from the cartilage cell lineage, regenerating cartilage tissues, repairing cartilage and protecting from, for instance, osteoarthritis, costochondritis, Herniation, achondroplasia or relapsing polychondritis, PEP12 is a peptide of general formula PEP1-AA¹⁷-PEP11; wherein AA¹⁷ is selected from the group consisting of G, A, V, L, I, P, F, M, W, T and S (in particular is selected from the group consisting of M, I, L, V and T); wherein PEP1 is selected from the group consisting of SAIS (SEQ ID NO: 6360), NAIS (SEQ ID NO: 6357), SPIS (SEQ ID NO: 6364), EPLP (SEQ ID NO: 6354) and EPLT (SEQ ID NO: 6355).

[0346] In certain embodiments useful for inducing differentiation of mensenchymal or progenitor stem cells from the cartilage cell lineage, regenerating cartilage tissues, repairing cartilage and protecting from, for instance, osteoarthritis, costochondritis, Herniation, achondroplasia or relapsing polychondritis, PEP11 is a peptide with 3 amino acids of general formula AA¹⁸-AA¹⁹-AA²⁰; wherein AA¹⁸ is selected from the group consisting of L, V, Q, A and R, in particular is L or V; wherein AA¹⁹ is selected from the group consisting of F, W, H and Y, in particular is Y or F; wherein AA² is selected from the group consisting of L, F, Y and I. In one particular example, PEP11 is selected from the group consisting of LYL, LYF, LFI, VYY and LYY.

[0347] In certain embodiments useful for inducing differentiation of mensenchymal or progenitor stem cells from the cartilage cell lineage, regenerating cartilage tissues, repairing cartilage and protecting from, for instance, osteoarthritis, costochondritis, Herniation, achondroplasia or relapsing polychondritis, PEP1 is selected from the group consisting of SAIS (SEQ ID NO: 6360), NAIS (SEQ ID NO: 6357), SPIS (SEQ ID NO: 6364), EPLP (SEQ ID NO: 6354) and EPLT (SEQ ID NO: 6355); PEP11 is selected from the group consisting of LYL, LYF, LFI, VYY and LYY; and the pair PEP1:PEP11 is selected from the group consisting of SAIS (SEQ ID NO: 6360):LYL, NAIS (SEQ ID NO: 6357):LYF, SPIS (SEQ ID NO: 6364):LFI, EPLP (SEQ ID NO: 6354):VYY and EPLT (SEQ ID NO: 6355):LYY.

[0348] The definitions of “PEP” pairs and triplets e.g. PEP3:PEP1, PEP5:PEP12, or PEP7:PEP5:PEP1, most particularly useful for inducing differentiation of mensenchymal or progenitor stem cells from the cartilage cell lineage, regenerating cartilage tissues, repairing cartilage and protecting from, for instance, osteoarthritis, costochondritis, Herniation, achondroplasia or relapsing polychondritis, are as already defined herein to the extent that PEP1, PEP3, PEP5, PEP7, PEP9, PEP11 and PEP12 are particularly useful for these applications as defined in the present cartilage section.

[0349] In certain embodiments useful for inducing differentiation of mensenchymal or progenitor stem cells from the cartilage cell lineage, regenerating cartilage tissues, repairing cartilage and protecting from, for instance, osteoarthritis, costochondritis, Herniation, achondroplasia or relapsing polychondritis, said GFR-binding compound is a synthetic molecule as defined herein in the definition section.

[0350] In certain embodiments useful for inducing differentiation of mensenchymal or progenitor stem cells from the cartilage cell lineage, regenerating cartilage tissues, repairing cartilage and protecting from, for instance, osteoarthritis, costochondritis, Herniation, achondroplasia or relapsing polychondritis, said GFR-binding compound is a synthetic peptide, or a variant or analog thereof, or a peptidomimetic.

[0351] Vascular Tissues

[0352] Certain embodiments of the invention are particularly useful for inducing differentiation of mensenchymal or progenitor stem cells from the vascular cell lineage, enhancing of endothelization, vascularization/angiogenesis, protecting a subject from heart tissue degeneration-related diseases, disorders, conditions or pathologies.

[0353] In other embodiments useful for inducing differentiation of mensenchymal or progenitor stem cells from the vascular cell lineage, enhancing of endothelization, vascularization/angiogenesis, protecting a subject from heart tissue degeneration-related diseases, disorders, conditions or pathologies, PEP1 is selected from the group consisting of SNIT (SEQ ID NO: 6362), RPVQ (SEQ ID NO: 6358) and RSVK (SEQ ID NO: 6359).

[0354] In other embodiments useful for inducing differentiation of mensenchymal or progenitor stem cells from the vascular cell lineage, enhancing of endothelization, vascularization/angiogenesis, protecting a subject from heart tissue degeneration-related diseases, disorders, conditions or pathologies, PEP3 is selected from the group consisting of VPT, SRV and TQV.

[0355] In other embodiments useful for inducing differentiation of mensenchymal or progenitor stem cells from the vascular cell lineage, enhancing of endothelization, vascularization/angiogenesis, protecting a subject from heart tissue degeneration-related diseases, disorders, conditions or pathologies, PEP5 is a peptide of general formula PEP3-AA¹¹-AA¹²; wherein PEP3 is selected from the group consisting of VPT, SRV and TQV; wherein AA¹¹ is selected from the group consisting of E, K, Q, R, A, D, G and H, in particular is E, G, H and Q; wherein AA¹² is selected from the group consisting of L, M, T, E, Q and H, in particular is selected from the group consisting of E, Q, H and L. In one particular example, PEP5 is selected from the group consisting of VPTGQ (SEQ ID NO: 6422), VPTEE (SEQ ID NO: 6420), SRVHH (SEQ ID NO: 6382) and TQVQL (SEQ ID NO: 6393).

[0356] In other embodiments useful for inducing differentiation of mensenchymal or progenitor stem cells from the vascular cell lineage, enhancing of endothelization, vascularization/angiogenesis, protecting a subject from heart tissue degeneration-related diseases, disorders, conditions or pathologies, PEP7 is an amino acid or a peptide with between two and seven amino acids of general formula AA¹-AA²-AA³-AA⁴-AA⁵-AA⁶-AA⁷ (SEQ ID NO: 6606); wherein AA¹, AA², AA³, AA⁴, and AA⁵ are independently absent or AA¹ as defined herein; wherein AA⁶ is absent or selected from the group consisting of S, T, C, E, Q, P and R, preferably is selected from the group consisting of E, Q and R; wherein AA⁷ is absent or is selected from the group consisting of S, T, C, E, Q, P and R, preferably is selected from the group consisting of S, C and P; and wherein at least one of AA¹, AA², AA³, AA⁴, AA⁵, AA or AA⁷ is not absent. In one particular example, PEP7 is selected from the group consisting of NDEGLEX (SEQ ID NO: 6447), SSVKXQP (SEQ ID NO: 6451) and RNVQXRP (SEQ ID NO: 6448).

[0357] In other embodiments useful for inducing differentiation of mensenchymal or progenitor stem cells from the vascular cell lineage, enhancing of endothelization, vascularization/angiogenesis, protecting a subject from heart tissue degeneration-related diseases, disorders, conditions or pathologies, PEP9 is a peptide of general formula AA¹-AA²-AA³-AA⁴-AA⁵-AA⁶-AA⁷-PEP5; wherein PEP5 is a peptide of formula PEP3-AA¹¹-AA¹²; wherein PEP3 is selected from the group consisting of VPT, SRV and TQV; wherein AA¹¹ is selected from the group consisting of E, K, Q, R, A, D, G and H, in particular is E, G, H and Q; wherein AA¹² is selected from the group consisting of L, M, T, E, Q and H, in particular is selected from the group consisting of E, Q, H and L; wherein AA¹, AA², AA³, AA⁴, and AA⁵ are independently absent or AA¹ as defined herein; wherein AA⁶ is absent or selected from the group consisting of S, T, C, E, Q, P and R, preferably is selected from the group consisting of E, Q and R; wherein AA⁷ is selected from the group consisting of S, T, C, E, Q, P and R, preferably is selected from the group consisting of S, C and P. In one particular example, PEP9 is selected from the group consisting of NDEGLEXVPTEE (SEQ ID NO: 6545), NDEGLEXVPTGQ (SEQ ID NO: 6546), SSVKXQPSRVHH (SEQ ID NO: 6565) and RNVQXRPTQVQL (SEQ ID NO: 6548).

[0358] In other embodiments useful for inducing differentiation of mensenchymal or progenitor stem cells from the vascular cell lineage, enhancing of endothelization, vascularization/angiogenesis, protecting a subject from heart tissue degeneration-related diseases, disorders, conditions or pathologies, PEP12 is a peptide of general formula PEP1-AA¹⁷-PEP11; wherein AA¹⁷ is selected from the group consisting of G, A, V, L, I, P, F, M, W, T and S (in particular is selected from the group consisting of M, I, L, V and T); wherein PEP1 is selected from the group consisting of SNIT (SEQ ID NO: 6362), RPVQ (SEQ ID NO: 6358) and RSVK (SEQ ID NO: 6359).

[0359] In other embodiments useful for inducing differentiation of mensenchymal or progenitor stem cells from the vascular cell lineage, enhancing of endothelization, vascularization/angiogenesis, protecting a subject from heart tissue degeneration-related diseases, disorders, conditions or pathologies, PEP11 is a peptide with 3 amino acids of general formula AA¹⁸-AA¹⁹-AA²⁰; wherein AA¹⁸ is selected from the group consisting of L, V, Q, A and R, in particular is selected from the group consisting of Q, A and R; wherein AA¹⁹ is selected from the group consisting of F, W, H, Y, I and K, in particular is I or K; wherein AA²⁰ is selected from the group consisting of L, F, Y, K, I, V and M, in particular is selected from the group consisting of M, V and I. In one particular example, PEP11 is selected from the group consisting of QIM, AKV and RKI.

[0360] In other embodiments useful for inducing differentiation of mensenchymal or progenitor stem cells from the vascular cell lineage, enhancing of endothelization, vascularization/angiogenesis, protecting a subject from heart tissue degeneration-related diseases, disorders, conditions or pathologies, PEP1 is selected from the group consisting of SNIT (SEQ ID NO: 6362), RPVQ (SEQ ID NO: 6358) and RSVK (SEQ ID NO: 6359); PEP11 is selected from the group consisting of QIM, AKV and RKI; and the pair PEP1:PEP11 is selected from the group consisting of SNIT (SEQ ID NO: 6362):QIM, RSVK (SEQ ID NO: 6359):KEVQV and RPVQ (SEQ ID NO: 6358):KKATV.

[0361] The definitions of “PEP” pairs and triplets e.g. PEP3:PEP1, PEP5:PEP12, or PEP7:PEP5:PEP1, most particularly useful for inducing differentiation of mensenchymal or progenitor stem cells from the vascular cell lineage, enhancing of endothelization, vascularization/angiogenesis, protecting a subject from heart tissue degeneration-related diseases, disorders, conditions or pathologies, are as already defined herein to the extent that PEP1, PEP3, PEP5, PEP7, PEP9, PEP11 and PEP12 are particularly useful for these applications as defined in the present vascular tissue section.

[0362] In other embodiments useful for inducing differentiation of mensenchymal or progenitor stem cells from the vascular cell lineage, enhancing of endothelization, vascularization/angiogenesis, protecting a subject from heart tissue degeneration-related diseases, disorders, conditions or pathologies, said GFR-binding compound is a synthetic molecule as defined herein in the definition section.

[0363] In other embodiments useful for inducing differentiation of mensenchymal or progenitor stem cells from the vascular cell lineage, enhancing of endothelization, vascularization/angiogenesis, protecting a subject from heart tissue degeneration-related diseases, disorders, conditions or pathologies, said GFR-binding compound is a synthetic peptide, or a variant or analog thereof, or a peptidomimetic.

[0364] Neuroregeneration

[0365] Certain embodiments of the invention are particularly useful for inducing differentiation of mensenchymal or progenitor stem cells from the neuronal cell lineage, promoting neuron-regeneration, and protecting from neuron degeneration-related conditions and diseases.

[0366] In certain embodiments useful for inducing differentiation of mensenchymal or progenitor stem cells from the neuronal cell lineage, promoting neuron-regeneration, and protecting from neuron degeneration-related conditions and diseases, PEP1 is selected from the group consisting of NAIS (SEQ ID NO: 6357), SPIS (SEQ ID NO: 6364) and EPIS (SEQ ID NO: 6353).

[0367] In certain embodiments useful for inducing differentiation of mensenchymal or progenitor stem cells from the neuronal cell lineage, promoting neuron-regeneration, and protecting from neuron degeneration-related conditions and diseases, PEP3 is selected from the group consisting of VPT, APT, VPA, VPQ and VSQ.

[0368] In certain embodiments useful for inducing differentiation of mensenchymal or progenitor stem cells from the neuronal cell lineage, promoting neuron-regeneration, and protecting from neuron degeneration-related conditions and diseases, PEP5 is a peptide of general formula PEP3-AA¹¹-AA¹²; wherein PEP3 is selected from the group consisting of VPT, APT, VPA, VPQ and VSQ; wherein AA¹¹ is selected from the group consisting of E, K, Q, R, A, D, G and H, in particular E, K, Q, R, A and D; wherein AA¹² is selected from the group consisting of L, M, T, E, Q and H, in particular L. In one particular example, PEP5 is selected from the group consisting of VPTEL (SEQ ID NO: 6421), APTKL (SEQ ID NO: 6369), APTQL (SEQ ID NO: 6372), VPTKL (SEQ ID NO: 6423), VPARL (SEQ ID NO: 6401), VPQAL (SEQ ID NO: 6410), VSQDL (SEQ ID NO: 6429) and VPQDL (SEQ ID NO: 6411).

[0369] In certain embodiments useful for inducing differentiation of mensenchymal or progenitor stem cells from the neuronal cell lineage, promoting neuron-regeneration, and protecting from neuron degeneration-related conditions and diseases, PEP7 is an amino acid or a peptide with between two and seven amino acids of general formula AA¹-AA²-AA³-AA⁴-AA⁵-AA⁶-AA⁷ (SEQ ID NO: 6606); wherein AA¹, AA², AA³, AA⁴, and AA⁵ are independently absent or AA¹ as defined herein; wherein AA¹ is absent or selected from the group consisting of S, T, C, E, Q, P and R, preferably S or C; wherein AA⁷ is absent or is selected from the group consisting of S, T, C, E, Q, P and R, preferably is S or C; and wherein at least one of AA¹, AA², AA³, AA⁴, AA⁵, AA⁶ or AA⁷ is not absent. In one particular example, PEP7 is selected from the group consisting of KIPKAXX (SEQ ID NO: 6445), SIPKAXX (SEQ ID NO: 6450), HVTKPTX (SEQ ID NO: 6443), YVPKPXX (SEQ ID NO: 6454), TVPKPXX (SEQ ID NO: 6453), AVPKAXX (SEQ ID NO: 6439), KVGKAXX (SEQ ID NO: 6446), ASAAPXX (SEQ ID NO: 6437), ASASPXX (SEQ ID NO: 6438) and RNVQXRP (SEQ ID NO: 6448).

[0370] In certain embodiments useful for inducing differentiation of mensenchymal or progenitor stem cells from the neuronal cell lineage, promoting neuron-regeneration, and protecting from neuron degeneration-related conditions and diseases, PEP9 is a peptide of general formula AA¹-AA²-AA³-AA⁴-AA⁵-AA⁶-AA⁷-PEP5; wherein PEP5 is a peptide of formula PEP3-AA¹¹-AA¹²; wherein PEP3 is selected from the group consisting of VPT, APT, VPA, VPQ and VSO; wherein AA¹¹ is selected from the group consisting of E, K, Q, R, A, D, G and H, in particular E, K, Q, R, A and D; wherein AA¹² is selected from the group consisting of L, M, T, E, Q and H, in particular L; wherein AA¹, AA², AA³, AA⁴, and AA⁵ are independently absent or AA¹ as defined herein; wherein AA⁶ is absent or selected from the group consisting of S, T, C, E, Q, P and R, preferably S or C; wherein AA⁷ is selected from the group consisting of S, T, C, E, Q, P and R, preferably is S or C. In one particular example, PEP9 is selected from the group consisting of KIPKAXXVPTEL (SEQ ID NO: 6535), SIPKAXXVPTEL (SEQ ID NO: 6563), HVTKPTXAPTKL (SEQ ID NO: 6511), YVPKPXXAPTKL (SEQ ID NO: 6583), TVPKPXXAPTQL (SEQ ID NO: 6575), AVPKAXXAPTKL (SEQ ID NO: 6479), KVGKAXXVPTKL (SEQ ID NO: 6543), ASAAPXXVPQAL (SEQ ID NO: 6468), ASASPXXVSQDL (SEQ ID NO: 6478), ASASPXXVPQDL (SEQ ID NO: 6476) and RNVQXRPTQVQL (SEQ ID NO: 6548).

[0371] In certain embodiments useful for inducing differentiation of mensenchymal or progenitor stem cells from the neuronal cell lineage, promoting neuron-regeneration, and protecting from neuron degeneration-related conditions and diseases, PEP12 is a peptide of general formula PEP1-AA¹⁷-PEP11; wherein AA¹⁷ is selected from the group consisting of G, A, V, L, I, P, F, M, W, T and S (in particular is selected from the group consisting of M, I, L, V and T); wherein PEP1 is selected from the group consisting of NAIS (SEQ ID NO: 6357), SPIS (SEQ ID NO: 6364) and EPIS (SEQ ID NO: 6353).

[0372] In certain embodiments useful for inducing differentiation of mensenchymal or progenitor stem cells from the neuronal cell lineage, promoting neuron-regeneration, and protecting from neuron degeneration-related conditions and diseases, PEP11 is a peptide with 3 amino acids of general formula AA¹⁸-AA¹⁹-AA²⁰; wherein AA¹⁸ is selected from the group consisting of L, V, Q, A and R, in particular is L; wherein AA¹⁹ is selected from the group consisting of F, W, H and Y (in particular is an aromatic, polar amino acid such as Y); wherein AA² is selected from the group consisting of L, F, Y, K, I, V and M, in particular is selected from the group consisting of L, F, I, and K. In one particular example, PEP11 is selected from the group consisting of LYL, LYF, LYI and LYK.

[0373] In certain embodiments useful for inducing differentiation of mensenchymal or progenitor stem cells from the neuronal cell lineage, promoting neuron-regeneration, and protecting from neuron degeneration-related conditions and diseases, PEP1 is selected from the group consisting of NAIS (SEQ ID NO: 6357), SPIS (SEQ ID NO: 6364) and EPIS (SEQ ID NO: 6353); PEP11 is selected from the group consisting of LYF, LYK, LYL and LYI; and the pair PEP1:PEP11 is selected from the group consisting of NAIS (SEQ ID NO: 6357):LYF, SPIS (SEQ ID NO: 6364):LYK, EPIS (SEQ ID NO: 6353):LYL and SPIS (SEQ ID NO: 6364):LYI.

[0374] The definitions of “PEP” pairs and triplets e.g. PEP3:PEP1, PEP5:PEP12, or PEP7:PEP5:PEP1, most particularly useful for inducing differentiation of mensenchymal or progenitor stem cells from the neuronal cell lineage, promoting neuron-regeneration, and protecting from neuron degeneration-related conditions and diseases, are as already defined herein to the extent that PEP1, PEP3, PEP5, PEP7, PEP9, PEP11 and PEP12 are particularly useful for these applications as defined in the present neuroregeneration section.

[0375] In certain embodiments useful for inducing differentiation of mensenchymal or progenitor stem cells from the neuronal cell lineage, promoting neuron-regeneration, and protecting from neuron degeneration-related conditions and diseases, said GFR-binding compound is a synthetic molecule as defined herein in the definition section.

[0376] In certain embodiments useful for inducing differentiation of mensenchymal or progenitor stem cells from the neuronal cell lineage, promoting neuron-regeneration, and protecting from neuron degeneration-related conditions and diseases, said GFR-binding compound is a synthetic peptide, or a variant or analog thereof, or a peptidomimetic.

[0377] Eye Retina

[0378] Certain embodiments of the invention are particularly useful for inducing differentiation of mensenchymal or progenitor stem cells from the retinal cell lineage, promoting eye retina cell regeneration and protecting from eye retina cell degeneration-related conditions or diseases such as macular degeneration.

[0379] In certain embodiments useful for inducing differentiation of mensenchymal or progenitor stem cells from the retinal cell lineage, promoting eye retina cell regeneration and protecting from eye retina cell degeneration-related conditions or diseases, PEP1 is SPIN (SEQ ID NO: 6363).

[0380] In certain embodiments useful for inducing differentiation of mensenchymal or progenitor stem cells from the retinal cell lineage, promoting eye retina cell regeneration and protecting from eye retina cell degeneration-related conditions or diseases, PEP3 is selected from the group consisting of VPT, APT, TPT, VPA and APV.

[0381] In certain embodiments useful for inducing differentiation of mensenchymal or progenitor stem cells from the retinal cell lineage, promoting eye retina cell regeneration and protecting from eye retina cell degeneration-related conditions or diseases, PEP5 is a peptide of general formula PEP3-AA¹¹-AA¹²; wherein PEP3 is selected from the group consisting of VPT, APT, TPT, VPA and APV; wherein AA¹¹ is selected from the group consisting of E, K, Q, R, A, D, G and H, in particular is E, K, Q and R; wherein AA¹² is selected from the group consisting of L, M, T, E, Q and H, in particular is L, M or T. In one particular example, PEP5 is selected from the group consisting of VPTEL (SEQ ID NO: 6421), APTKL (SEQ ID NO: 6369), APTQL (SEQ ID NO: 6372), VPTKL (SEQ ID NO: 6423), TPTKM (SEQ ID NO: 6388), VPARL (SEQ ID NO: 6401), VPTRL (SEQ ID NO: 6427) and APVKT (SEQ ID NO: 6379).

[0382] In certain embodiments useful for inducing differentiation of mensenchymal or progenitor stem cells from the retinal cell lineage, promoting eye retina cell regeneration and protecting from eye retina cell degeneration-related conditions or diseases, PEP7 is an amino acid or a peptide with between two and seven amino acids of general formula AA¹-AA²-AA³-AA⁴-AA⁵-AA⁶-AA⁷ (SEQ ID NO: 6606); wherein AA¹, AA², AA³, AA⁴, and AA⁵ are independently absent or AA¹ as defined herein; wherein AA¹ is absent or selected from the group consisting of S, T, C, E, Q, P and R, preferably is S or C; wherein AA⁷ is absent or is selected from the group consisting of S, T, C, E, Q, P and R, preferably is S or C; and wherein at least one of AA¹, AA², AA³, AA⁴, AA⁵, AA⁶ or AA⁷ is not absent. In one particular example, PEP7 is selected from the group consisting of KIPKAXX (SEQ ID NO: 6445), SIPKAXX (SEQ ID NO: 6450), HVTKPTX (SEQ ID NO: 6443), YVPKPXX (SEQ ID NO: 6454), TVPKPXX (SEQ ID NO: 6453), AVPKAXX (SEQ ID NO: 6439), KVGKAXX (SEQ ID NO: 6446), KASKAXX (SEQ ID NO: 6444), GSAGPXX (SEQ ID NO: 6441), AAPAXXS, STPPTXX (SEQ ID NO: 6452), HVPKPXX (SEQ ID NO: 6442) and RVPSTXX (SEQ ID NO: 6449).

[0383] In certain embodiments useful for inducing differentiation of mensenchymal or progenitor stem cells from the retinal cell lineage, promoting eye retina cell regeneration and protecting from eye retina cell degeneration-related conditions or diseases, PEP9 is a peptide of general formula AA¹-AA²-AA³-AA⁴-AA⁵-AA⁶-AA⁷-PEP5; wherein PEP5 is a peptide of formula PEP3-AA¹¹-AA¹²; wherein PEP3 is selected from the group consisting of VPT, APT, TPT, VPA and APV; wherein AA¹¹ is selected from the group consisting of E, K, Q, R, A, D, G and H, in particular is E, K, Q and R; wherein AA¹² is selected from the group consisting of L, M, T, E, Q and H, in particular is L, M or T; wherein AA, AA², AA³, AA⁴, and AA⁵ are independently absent or AA¹ as defined herein; wherein AA⁶ is absent or selected from the group consisting of S, T, C, E, Q, P and R, preferably is S or C; wherein AA⁷ is selected from the group consisting of S, T, C, E, Q, P and R, preferably is S or C. In one particular example, PEP9 is selected from the group consisting of KIPKAXXVPTEL (SEQ ID NO: 6535), SIPKAXXVPTEL (SEQ ID NO: 6563), HVTKPTXAPTKL (SEQ ID NO: 6511), YVPKPXXAPTKL (SEQ ID NO: 6583), TVPKPXXAPTQL (SEQ ID NO: 6575), AVPKAXXAPTKL (SEQ ID NO: 6479), KVGKAXXVPTKL (SEQ ID NO: 6543), KASKAXXVPTKL (SEQ ID NO: 6527), GSAGPXX (SEQ ID NO: 6441)TPTKL (SEQ ID NO: 6387), AAPASXXVPARL (SEQ ID NO: 6458), STPPTXXVPTRL (SEQ ID NO: 6573), HVPKPXXAPTKL (SEQ ID NO: 6503) and RVPSTXXAPVKT (SEQ ID NO: 6550).

[0384] In certain embodiments useful for inducing differentiation of mensenchymal or progenitor stem cells from the retinal cell lineage, promoting eye retina cell regeneration and protecting from eye retina cell degeneration-related conditions or diseases, PEP12 is a peptide of general formula PEP1-AA¹⁷-PEP11; wherein AA¹⁷ is selected from the group consisting of G, A, V, L, I, P, F, M, W, T and S (in particular is selected from the group consisting of M, I, L, V and T); wherein PEP1 is SPIN (SEQ ID NO: 6363).

[0385] In certain embodiments useful for inducing differentiation of mensenchymal or progenitor stem cells from the retinal cell lineage, promoting eye retina cell regeneration and protecting from eye retina cell degeneration-related conditions or diseases, PEP11 is a peptide with 3 amino acids of general formula AA¹⁸-AA¹⁹-AA²⁰; wherein AA¹⁸ is selected from the group consisting of L, V, Q, A and R, in particular is L; wherein AA¹⁹ is selected from the group consisting of F, W, H and Y, in particular is Y or F; wherein AA²⁰ is selected from the group consisting of L, F, Y, K, I, V and M, in particular is selected from the group consisting of L, F, Y, K, I and V. In one particular example, PEP11 is LYF.

[0386] In certain embodiments useful for inducing differentiation of mensenchymal or progenitor stem cells from the retinal cell lineage, promoting eye retina cell regeneration and protecting from eye retina cell degeneration-related conditions or diseases, PEP1 is SPIN (SEQ ID NO: 6363) and PEP11 is LYF.

[0387] The definitions of “PEP” pairs and triplets e.g. PEP3:PEP1, PEP5:PEP12, or PEP7:PEP5:PEP1, most particularly useful for inducing differentiation of mensenchymal or progenitor stem cells from the retinal cell lineage, promoting eye retina cell regeneration and protecting from eye retina cell degeneration-related conditions or diseases, are as already defined herein to the extent that PEP1, PEP3, PEP5, PEP7, PEP9, PEP11 and PEP12 are particularly useful for these applications as defined in the present eye retina section.

[0388] In certain embodiments useful for inducing differentiation of mensenchymal or progenitor stem cells from the retinal cell lineage, promoting eye retina cell regeneration and protecting from eye retina cell degeneration-related conditions or diseases, said GFR-binding compound is a synthetic molecule as defined herein in the definition section.

[0389] In certain embodiments useful for inducing differentiation of mensenchymal or progenitor stem cells from the retinal cell lineage, promoting eye retina cell regeneration and protecting from eye retina cell degeneration-related conditions or diseases, said GFR-binding compound is a synthetic peptide, or a variant or analog thereof, or a peptidomimetic.

[0390] Renal Tissues

[0391] Certain embodiments of the invention are particularly useful for inducing differentiation of mensenchymal or progenitor stem cells from the renal cell lineage, promoting renal cell regeneration and/or renal functions and protecting from renal cell degeneration-related conditions or diseases such as chronic kidney disease or renal fibrosis.

[0392] In certain embodiments useful for inducing differentiation of mensenchymal or progenitor stem cells from the renal cell lineage, promoting renal cell regeneration and/or renal functions and protecting from renal cell degeneration-related conditions or diseases, PEP1 is SPIN (SEQ ID NO: 6363).

[0393] In certain embodiments useful for inducing differentiation of mensenchymal or progenitor stem cells from the renal cell lineage, promoting renal cell regeneration and/or renal functions and protecting from renal cell degeneration-related conditions or diseases, PEP3 is selected from the group consisting of VPT, APT, TPT, VPA and APV.

[0394] In certain embodiments useful for inducing differentiation of mensenchymal or progenitor stem cells from the renal cell lineage, promoting renal cell regeneration and/or renal functions and protecting from renal cell degeneration-related conditions or diseases, PEP5 is a peptide of general formula PEP3-AA¹¹-AA¹²; wherein PEP3 is selected from the group consisting of VPT, APT, TPT, VPA and APV; wherein AA¹¹ is selected from the group consisting of E, K, Q, R, A, D, G and H, in particular is E, K, Q and R; wherein AA¹² is selected from the group consisting of L, M, T, E, Q and H, in particular is L, M or T. In one particular example, PEP5 is selected from the group consisting of VPTEL (SEQ ID NO: 6421), APTKL (SEQ ID NO: 6369), APTQL (SEQ ID NO: 6372), VPTKL (SEQ ID NO: 6423), TPTKM (SEQ ID NO: 6388), VPARL (SEQ ID NO: 6401), VPTRL (SEQ ID NO: 6427) and APVKT (SEQ ID NO: 6379).

[0395] In certain embodiments useful for inducing differentiation of mensenchymal or progenitor stem cells from the renal cell lineage, promoting renal cell regeneration and/or renal functions and protecting from renal cell degeneration-related conditions or diseases, PEP7 is an amino acid or a peptide with between two and seven amino acids of general formula AA¹-AA²-AA³-AA⁴-AA⁵-AA⁶-AA⁷ (SEQ ID NO: 6606); wherein AA¹, AA², AA³, AA⁴, and AA⁵ are independently absent or AA¹ as defined herein; wherein AA⁷ is absent or selected from the group consisting of S, T, C, E, Q, P and R, preferably is S or C; wherein AA⁷ is absent or is selected from the group consisting of S, T, C, E, Q, P and R, preferably is S or C; and wherein at least one of AA, AA², AA³, AA⁴, AA⁵, AA or AA⁷ is not absent. In one particular example, PEP7 is selected from the group consisting of KIPKAXX (SEQ ID NO: 6445), SIPKAXX (SEQ ID NO: 6450), HVTKPTX (SEQ ID NO: 6443), YVPKPXX (SEQ ID NO: 6454), TVPKPXX (SEQ ID NO: 6453), AVPKAXX (SEQ ID NO: 6439), KVGKAXX (SEQ ID NO: 6446), KASKAXX (SEQ ID NO: 6444), GSAGPXX (SEQ ID NO: 6441), AAPAXXS, STPPTXX (SEQ ID NO: 6452), HVPKPXX (SEQ ID NO: 6442) and RVPSTXX (SEQ ID NO: 6449).

[0396] In certain embodiments useful for inducing differentiation of mensenchymal or progenitor stem cells from the renal cell lineage, promoting renal cell regeneration and/or renal functions and protecting from renal cell degeneration-related conditions or diseases, PEP9 is a peptide of general formula AA¹-AA²-AA³-AA⁴-AA⁵-AA⁶-AA⁷-PEP5; wherein PEP5 is a peptide of formula PEP3-AA¹¹-AA¹²; wherein PEP3 is selected from the group consisting of VPT, APT, TPT, VPA and APV; wherein AA¹¹ is selected from the group consisting of E, K, Q, R, A, D, G and H, in particular is E, K, Q and R; wherein AA¹² is selected from the group consisting of L, M, T, E, Q and H, in particular is L, M or T; wherein AA¹, AA², AA³, AA⁴, and AA⁵ are independently absent or AA¹ as defined herein; wherein AA^{e} is absent or selected from the group consisting of S, T, C, E, Q, P and R, preferably is S or C; wherein AA⁷ is selected from the group consisting of S, T, C, E, Q, P and R, preferably is S or C. In one particular example, PEP9 is selected from the group consisting of KIPKAXXVPTEL (SEQ ID NO: 6535), SIPKAXXVPTEL (SEQ ID NO: 6563), HVTKPTXAPTKL (SEQ ID NO: 6511), YVPKPXXAPTKL (SEQ ID NO: 6583), TVPKPXXAPTQL (SEQ ID NO: 6575), AVPKAXXAPTKL (SEQ ID NO: 6479), KVGKAXXVPTKL (SEQ ID NO: 6543), KASKAXXVPTKL (SEQ ID NO: 6527), GSAGPXX (SEQ ID NO: 6441)TPTKL (SEQ ID NO: 6387), AAPASXXVPARL (SEQ ID NO: 6458), STPPTXXVPTRL (SEQ ID NO: 6573), HVPKPXXAPTKL (SEQ ID NO: 6503) and RVPSTXXAPVKT (SEQ ID NO: 6550).

[0397] In certain embodiments useful for inducing differentiation of mensenchymal or progenitor stem cells from the renal cell lineage, promoting renal cell regeneration and/or renal functions and protecting from renal cell degeneration-related conditions or diseases, PEP12 is a peptide of general formula PEP1-AA¹⁷-PEP11; wherein AA¹⁷ is selected from the group consisting of G, A, V, L, I, P, F, M, W, T and S (in particular is selected from the group consisting of M, I, L, V and T); wherein PEP1 is SPIN (SEQ ID NO: 6363).

[0398] In certain embodiments useful for inducing differentiation of mensenchymal or progenitor stem cells from the renal cell lineage, promoting renal cell regeneration and/or renal functions and protecting from renal cell degeneration-related conditions or diseases, PEP11 is a peptide with 3 amino acids of general formula AA¹⁸-AA¹⁹-AA²⁰; wherein AA¹⁸ is selected from the group consisting of L, V, Q, A and R, in particular is L; wherein AA¹⁹ is selected from the group consisting of F, W, H and Y, in particular is Y or F; wherein AA²⁰ is selected from the group consisting of L, F, Y, K, I, V and M, in particular is selected from the group consisting of L, F, Y, K, I and V. In one particular example, PEP11 is LYF.

[0399] In certain embodiments useful for inducing differentiation of mensenchymal or progenitor stem cells from the renal cell lineage, promoting renal cell regeneration and/or renal functions and protecting from renal cell degeneration-related conditions or diseases, PEP1 is SPIN (SEQ ID NO: 6363) and PEP11 is LYF.

[0400] The definitions of “PEP” pairs and triplets e.g. PEP3:PEP1, PEP5:PEP12, or PEP7:PEP5:PEP1, most particularly useful for inducing differentiation of mensenchymal or progenitor stem cells from the renal cell lineage, promoting renal cell regeneration and/or renal functions and protecting from renal cell degeneration-related conditions or diseases, are as already defined herein to the extent that PEP1, PEP3, PEP5, PEP7, PEP9, PEP11 and PEP12 are particularly useful for these applications as defined in the present renal tissue section.

[0401] In certain embodiments useful for inducing differentiation of mensenchymal or progenitor stem cells from the renal cell lineage, promoting renal cell regeneration and/or renal functions and protecting from renal cell degeneration-related conditions or diseases, said GFR-binding compound is a synthetic molecule as defined herein in the definition section.

[0402] In certain embodiments useful for inducing differentiation of mensenchymal or progenitor stem cells from the renal cell lineage, promoting renal cell regeneration and/or renal functions and protecting from renal cell degeneration-related conditions or diseases, said GFR-binding compound is a synthetic peptide, or a variant or analog thereof, or a peptidomimetic.

[0403] Ligaments and Tendons

[0404] Certain embodiments of the invention are particularly useful for inducing differentiation of mensenchymal or progenitor stem cells from the ligament and tendon (L/T) cell lineage, promoting fibrous tissue formation and T/L regeneration and protecting from LT cell degeneration and LT cell degeneration-related diseases, conditions, disorders or pathologies.

[0405] In certain embodiments useful for inducing differentiation of mensenchymal or progenitor stem cells from the ligament and tendon (L/T) cell lineage, promoting fibrous tissue formation and T/L regeneration and protecting from L/T cell degeneration and L/T cell degeneration-related diseases, conditions, disorders or pathologies, PEP1 is selected from the group consisting of NAIS (SEQ ID NO: 6357), SPIS (SEQ ID NO: 6364), EPLP (SEQ ID NO: 6354) and EPLT (SEQ ID NO: 6355).

[0406] In certain embodiments useful for inducing differentiation of mensenchymal or progenitor stem cells from the ligament and tendon (L/T) cell lineage, promoting fibrous tissue formation and T/L regeneration and protecting from L/T cell degeneration and L/T cell degeneration-related diseases, conditions, disorders or pathologies, PEP3 is selected from the group consisting of VPT, APT, VPQ and VSO.

[0407] In certain embodiments useful for inducing differentiation of mensenchymal or progenitor stem cells from the ligament and tendon (L/T) cell lineage, promoting fibrous tissue formation and T/L regeneration and protecting from L/T cell degeneration and L/T cell degeneration-related diseases, conditions, disorders or pathologies, PEP5 is a peptide of general formula PEP3-AA¹¹-AA¹²; wherein PEP3 is selected from the group consisting of VPT, APT, VPQ and VSO; wherein AA¹¹ is selected from the group consisting of E, K, Q, R, A, D, G and H, in particular is E, K, Q, R, A and D; wherein AA¹² is selected from the group consisting of L, M, T, E, Q and H, in particular is L In one particular example, PEP5 is selected from the group consisting of VPTEL (SEQ ID NO: 6421), APTKL (SEQ ID NO: 6369), APTQL (SEQ ID NO: 6372), VPTRL (SEQ ID NO: 6427), VPQAL (SEQ ID NO: 6410), VSODL (SEQ ID NO: 6429) and VPQDL (SEQ ID NO: 6411).

[0408] In certain embodiments useful for inducing differentiation of mensenchymal or progenitor stem cells from the ligament and tendon (L/T) cell lineage, promoting fibrous tissue formation and T/L regeneration and protecting from L/T cell degeneration and L/T cell degeneration-related diseases, conditions, disorders or pathologies, PEP7 is an amino acid or a peptide with between two and seven amino acids of general formula AA¹-AA²-AA³-AA⁴-AA⁵-AA⁶-AA⁷ (SEQ ID NO: 6606); wherein AA¹, AA², AA³, AA⁴, and AA⁵ are independently absent or AA¹ as defined herein; wherein AA⁶ is absent or selected from the group consisting of S, T, C, E, Q, P and R, preferably is selected from the group consisting of T, S and C; wherein AA⁷ is absent or is selected from the group consisting of S, T, C, E, Q, P and R, preferably S or C; and wherein at least one of AA¹, AA², AA³, AA⁴, AA⁵, AA⁶ or AA⁷ is not absent. In one particular example, PEP7 is selected from the group consisting of KIPKAXX (SEQ ID NO: 6445), SIPKAXX (SEQ ID NO: 6450), HVTKPTX (SEQ ID NO: 6443), YVPKPXX (SEQ ID NO: 6454), TVPKPXX (SEQ ID NO: 6453), STPPTXX (SEQ ID NO: 6452), ASAAPXX (SEQ ID NO: 6437) and ASASPXX (SEQ ID NO: 6438).

[0409] In certain embodiments useful for inducing differentiation of mensenchymal or progenitor stem cells from the ligament and tendon (L/T) cell lineage, promoting fibrous tissue formation and T/L regeneration and protecting from L/T cell degeneration and L/T cell degeneration-related diseases, conditions, disorders or pathologies, PEP9 is a peptide of general formula AA¹-AA²-AA³-AA⁴-AA⁵-AA⁶-AA⁷-PEP5; wherein PEP5 is a peptide of formula PEP3-AA¹¹-AA¹²; wherein PEP3 is selected from the group consisting of VPT, APT, VPQ and VSO; wherein AA¹¹ is selected from the group consisting of E, K, Q, R, A, D, G and H, in particular is E, K, Q, R, A and D; wherein AA¹² is selected from the group consisting of L, M, T, E, Q and H, in particular is L; wherein AA¹, AA², AA³, AA⁴, and AA⁵ are independently absent or AA¹ as defined herein; wherein AA is absent or selected from the group consisting of S, T, C, E, Q, P and R, preferably is selected from the group consisting of T, S and C; wherein AA⁷ is selected from the group consisting of S, T, C, E, Q, P and R, preferably S or C. In one particular example, PEP9 is selected from the group consisting of KIPKAXXVPTEL (SEQ ID NO: 6535), SIPKAXXVPTEL (SEQ ID NO: 6563), HVTKPTXAPTKL (SEQ ID NO: 6511), YVPKPXXAPTKL (SEQ ID NO: 6583), TVPKPXXAPTQL (SEQ ID NO: 6575), STPPTXXVPTRL (SEQ ID NO: 6573), ASAAPXXVPQAL (SEQ ID NO: 6468), ASASPXXVSQDL (SEQ ID NO: 6478) and ASASPXXVPQDL (SEQ ID NO: 6476).

[0410] In certain embodiments useful for inducing differentiation of mensenchymal or progenitor stem cells from the ligament and tendon (L/T) cell lineage, promoting fibrous tissue formation and T/L regeneration and protecting from L/T cell degeneration and L/T cell degeneration-related diseases, conditions, disorders or pathologies, PEP12 is a peptide of general formula PEP1-AA¹⁷-PEP11; wherein AA¹⁷ is selected from the group consisting of G, A, V, L, I, P, F, M, W, T and S (in particular is selected from the group consisting of M, I, L, V and T); wherein PEP1 is selected from the group consisting of NAIS (SEQ ID NO: 6357), SPIS (SEQ ID NO: 6364), EPLP (SEQ ID NO: 6354) and EPLT (SEQ ID NO: 6355).

[0411] In certain embodiments useful for inducing differentiation of mensenchymal or progenitor stem cells from the ligament and tendon (L/T) cell lineage, promoting fibrous tissue formation and T/L regeneration and protecting from L/T cell degeneration and L/T cell degeneration-related diseases, conditions, disorders or pathologies, PEP11 is a peptide with 3 amino acids of general formula AA¹⁸-AA¹⁹-AA²⁰; wherein AA¹⁸ is selected from the group consisting of L, V, Q, A and R, in particular is L or V; wherein AA¹⁹ is selected from the group consisting of F, W, H and Y, in particular is Y or F; wherein AA²⁰ is selected from the group consisting of L, F, Y, K, I, V and M, in particular is selected from the group consisting of F, I and Y. In one particular example, PEP11 is selected from the group consisting of LYF, LFI, VYY and LYY.

[0412] In certain embodiments useful for inducing differentiation of mensenchymal or progenitor stem cells from the ligament and tendon (L/T) cell lineage, promoting fibrous tissue formation and T/L regeneration and protecting from L/T cell degeneration and L/T cell degeneration-related diseases, conditions, disorders or pathologies, PEP1 is selected from the group consisting of NAIS (SEQ ID NO: 6357), SPIS (SEQ ID NO: 6364), EPLP (SEQ ID NO: 6354) and EPLT (SEQ ID NO: 6355); PEP11 is selected from the group consisting of LYF, LFI, VYY and LYY; and the pair PEP1:PEP11 is selected from the group consisting of NAIS (SEQ ID NO: 6357):LYF, SPIS (SEQ ID NO: 6364):LFI, EPLP (SEQ ID NO: 6354):VYY and EPLT (SEQ ID NO: 6355):LYY.

[0413] The definitions of “PEP” pairs and triplets e.g. PEP3:PEP1, PEP5:PEP12, or PEP7:PEP5:PEP1, most particularly useful for inducing differentiation of mensenchymal or progenitor stem cells from the ligament and tendon (L/T) cell lineage, promoting fibrous tissue formation and T/L regeneration and protecting from LT cell degeneration and L/T cell degeneration-related diseases, conditions, disorders or pathologies, are as already defined herein to the extent that PEP1, PEP3, PEP5, PEP7, PEP9, PEP11 and PEP12 are particularly useful for these applications as defined in the present L/T section.

[0414] In certain embodiments useful for inducing differentiation of mensenchymal or progenitor stem cells from the ligament and tendon (L/T) cell lineage, promoting fibrous tissue formation and T/L regeneration and protecting from L/T cell degeneration and L/T cell degeneration-related diseases, conditions, disorders or pathologies, said GFR-binding compound is a synthetic molecule as defined herein in the definition section.

[0415] In certain embodiments useful for inducing differentiation of mensenchymal or progenitor stem cells from the ligament and tendon (L/T) cell lineage, promoting fibrous tissue formation and T/L regeneration and protecting from L/T cell degeneration and L/T cell degeneration-related diseases, conditions, disorders or pathologies, said GFR-binding compound is a synthetic peptide, or a variant or analog thereof, or a peptidomimetic.

[0416] In other embodiments also useful for inducing differentiation of mensenchymal or progenitor stem cells from the ligament and tendon (L/T) cell lineage, promoting fibrous tissue formation and T/L regeneration and protecting from L/T cell degeneration and L/T cell degeneration-related diseases, conditions, disorders or pathologies, PEP1 is SPIS (SEQ ID NO: 6364).

[0417] In other embodiments also useful for inducing differentiation of mensenchymal or progenitor stem cells from the ligament and tendon (L/T) cell lineage, promoting fibrous tissue formation and T/L regeneration and protecting from L/T cell degeneration and L/T cell degeneration-related diseases, conditions, disorders or pathologies, PEP3 is selected from the group consisting of VPT, APT, TPT, VPA and APV.

[0418] In other embodiments also useful for inducing differentiation of mensenchymal or progenitor stem cells from the ligament and tendon (L/T) cell lineage, promoting fibrous tissue formation and T/L regeneration and protecting from L/T cell degeneration and L/T cell degeneration-related diseases, conditions, disorders or pathologies, PEP5 is a peptide of general formula PEP3-AA¹¹-AA¹²; wherein PEP3 is selected from the group consisting of VPT, APT, TPT, VPA and APV; wherein AA¹¹ is selected from the group consisting of E, K, Q, R, A, D, G and H, in particular is selected from the group consisting of E, K, Q and R; wherein AA¹² is selected from the group consisting of L, M, T, E, Q and H, in particular is selected from the group consisting of L, M and T. In one particular example, PEP5 is selected from the group consisting of VPTEL (SEQ ID NO: 6421), APTKL (SEQ ID NO: 6369), APTQL (SEQ ID NO: 6372), VPTKL (SEQ ID NO: 6423), TPTKM (SEQ ID NO: 6388), VPARL (SEQ ID NO: 6401), VPTRL (SEQ ID NO: 6427) and APVKT (SEQ ID NO: 6379).

[0419] In other embodiments also useful for inducing differentiation of mensenchymal or progenitor stem cells from the ligament and tendon (L/T) cell lineage, promoting fibrous tissue formation and T/L regeneration and protecting from L/T cell degeneration and L/T cell degeneration-related diseases, conditions, disorders or pathologies, PEP7 is an amino acid or a peptide with between two and seven amino acids of general formula AA¹-AA²-AA³-AA⁴-AA⁵-AA⁶-AA⁷ (SEQ ID NO: 6606); wherein AA¹, AA², AA³, AA⁴, and AA⁵ are independently absent or AA¹ as defined herein; wherein AA is absent or selected from the group consisting of S, T, C, E, Q, P and R, preferably is S or C; wherein AA⁶ is absent or is selected from the group consisting of S, T, C, E, Q, P and R, preferably is S or C; and wherein at least one of AA¹, AA², AA³, AA⁴, AA⁵, AA⁶ or AA⁷ is not absent. In one particular example, PEP7 is selected from the group consisting of KIPKAXX (SEQ ID NO: 6445), SIPKAXX (SEQ ID NO: 6450), HVTKPTX (SEQ ID NO: 6443), YVPKPXX (SEQ ID NO: 6454), TVPKPXX (SEQ ID NO: 6453), AVPKAXX (SEQ ID NO: 6439), KVGKAXX (SEQ ID NO: 6446), KASKAXX (SEQ ID NO: 6444), GSAGPXX (SEQ ID NO: 6441), AAPAXXS, STPPTXX (SEQ ID NO: 6452), HVPKPXX (SEQ ID NO: 6442) and RVPSTXX (SEQ ID NO: 6449).

[0420] In other embodiments also useful for inducing differentiation of mensenchymal or progenitor stem cells from the ligament and tendon (L/T) cell lineage, promoting fibrous tissue formation and T/L regeneration and protecting from L/T cell degeneration and L/T cell degeneration-related diseases, conditions, disorders or pathologies, PEP9 is a peptide of general formula AA¹-AA²-AA³-AA⁴-AA⁵-AA⁶-AA⁷-PEP5; wherein PEP5 is a peptide of formula PEP3-AA¹¹-AA¹²; wherein PEP3 is selected from the group consisting of VPT, APT, TPT, VPA and APV; wherein AA¹¹ is selected from the group consisting of E, K, Q, R, A, D, G and H, in particular is E, K, Q and R; wherein AA¹² is selected from the group consisting of L, M, T, E, Q and H, in particular is L, M or T; wherein AA, AA², AA³, AA⁴, and AA⁵ are independently absent or AA¹ as defined herein; wherein AA^{e} is absent or selected from the group consisting of S, T, C, E, Q, P and R, preferably is S or C; wherein AA⁷ is selected from the group consisting of S, T, C, E, Q, P and R, preferably is S or C. In one particular example, PEP9 is selected from the group consisting of KIPKAXXVPTEL (SEQ ID NO: 6535), SIPKAXXVPTEL (SEQ ID NO: 6563), HVTKPTXAPTKL (SEQ ID NO: 6511), YVPKPXXAPTKL (SEQ ID NO: 6583), TVPKPXXAPTQL (SEQ ID NO: 6575), AVPKAXXAPTKL (SEQ ID NO: 6479), KVGKAXXVPTKL (SEQ ID NO: 6543), KASKAXXVPTKL (SEQ ID NO: 6527), GSAGPXX (SEQ ID NO: 6441)TPTKL (SEQ ID NO: 6387), AAPASXXVPARL (SEQ ID NO: 6458), STPPTXXVPTRL (SEQ ID NO: 6573), HVPKPXXAPTKL (SEQ ID NO: 6503) and RVPSTXXAPVKT (SEQ ID NO: 6550).

[0421] In other embodiments also useful for inducing differentiation of mensenchymal or progenitor stem cells from the ligament and tendon (L/T) cell lineage, promoting fibrous tissue formation and T/L regeneration and protecting from L/T cell degeneration and L/T cell degeneration-related diseases, conditions, disorders or pathologies, PEP12 is a peptide of general formula PEP1-AA¹⁷-PEP11; wherein AA¹⁷ is selected from the group consisting of G, A, V, L, I, P, F, M, W, T and S (in particular is selected from the group consisting of M, I, L, V and T); wherein PEP1 is SPIS (SEQ ID NO: 6364).

[0422] In other embodiments also useful for inducing differentiation of mensenchymal or progenitor stem cells from the ligament and tendon (L/T) cell lineage, promoting fibrous tissue formation and T/L regeneration and protecting from L/T cell degeneration and L/T cell degeneration-related diseases, conditions, disorders or pathologies, PEP11 is a peptide with 3 amino acids of general formula AA¹⁸-AA¹⁹-AA²⁰; wherein AA¹⁸ is selected from the group consisting of L, V, Q, A and R, in particular is L; wherein AA¹⁹ is selected from the group consisting of F, W, H and Y, in particular is a polar aromatic amino acid such as Y; wherein AA⁰ is selected from the group consisting of L, F, Y, K, I, V and M, in particular is I. In one particular example, PEP11 is LYI.

[0423] In other embodiments also useful for inducing differentiation of mensenchymal or progenitor stem cells from the ligament and tendon (L/T) cell lineage, promoting fibrous tissue formation and T/L regeneration and protecting from L/T cell degeneration and L/T cell degeneration-related diseases, conditions, disorders or pathologies, PEP1 is SPIS (SEQ ID NO: 6364) and PEP11 is LYI.

[0424] The definitions of “PEP” pairs and triplets e.g. PEP3:PEP1, PEP5:PEP12, or PEP7:PEP5:PEP1, also most particularly useful for inducing differentiation of mensenchymal or progenitor stem cells from the ligament and tendon (L/T) cell lineage, promoting fibrous tissue formation and T/L regeneration and protecting from L/T cell degeneration and L/T cell degeneration-related diseases, conditions, disorders or pathologies, are as already defined herein to the extent that PEP1, PEP3, PEP5, PEP7, PEP9, PEP11 and PEP12 are particularly useful for these applications as defined in the present L/T section.

[0425] In other embodiments also useful for inducing differentiation of mensenchymal or progenitor stem cells from the ligament and tendon (L/T) cell lineage, promoting fibrous tissue formation and T/L regeneration and protecting from L/T cell degeneration and L/T cell degeneration-related diseases, conditions, disorders or pathologies, said GFR-binding compound is a synthetic molecule as defined herein in the definition section.

[0426] In other embodiments also useful for inducing differentiation of mensenchymal or progenitor stem cells from the ligament and tendon (L/T) cell lineage, promoting fibrous tissue formation and T/L regeneration and protecting from L/T cell degeneration and L/T cell degeneration-related diseases, conditions, disorders or pathologies, said GFR-binding compound is a synthetic peptide, or a variant or analog thereof, or a peptidomimetic.

[0427] Wound Healing

[0428] Certain embodiments of the invention are particularly useful for inducing differentiation of mensenchymal or progenitor stem cells involved in the process of wound healing as defined herein, promoting wound healing, skin repair and cellular migration.

[0429] In certain embodiments useful for inducing differentiation of mensenchymal or progenitor stem cells involved in the process of wound healing as defined herein, promoting wound healing, skin repair and cellular migration, PEP1 is selected from the group consisting of SNIT (SEQ ID NO: 6362), RPVQ (SEQ ID NO: 6358) and RSVK (SEQ ID NO: 6359).

[0430] In certain embodiments useful for inducing differentiation of mensenchymal or progenitor stem cells involved in the process of wound healing as defined herein, promoting wound healing, skin repair and cellular migration, PEP3 is selected from the group consisting of VPT, SRV and TQV.

[0431] In certain embodiments useful for inducing differentiation of mensenchymal or progenitor stem cells involved in the process of wound healing as defined herein, promoting wound healing, skin repair and cellular migration, PEP5 is a peptide of general formula PEP3-AA¹¹-AA¹²; wherein PEP3 is selected from the group consisting of VPT, SRV and TQV; wherein AA¹¹ is selected from the group consisting of E, K, Q, R, A, D, G and H, in particular is selected from the group consisting of E, G, H and Q; wherein AA¹² is selected from the group consisting of L, M, T, E, Q and H, in particular is selected from the group consisting of E, Q, H and L In one particular example, PEP5 is selected from the group consisting of VPTGQ (SEQ ID NO: 6422), VPTEE (SEQ ID NO: 6420), SRVHH (SEQ ID NO: 6382) and TQVQL (SEQ ID NO: 6393).

[0432] In certain embodiments useful for inducing differentiation of mensenchymal or progenitor stem cells involved in the process of wound healing as defined herein, promoting wound healing, skin repair and cellular migration, PEP7 is an amino acid or a peptide with between two and seven amino acids of general formula AA¹-AA²-AA³-AA⁴-AA⁵-AA⁶-AA⁷ (SEQ ID NO: 6606); wherein AA¹, AA², AA³, AA⁴, and AA⁵ are independently absent or AA¹ as defined herein; wherein AA⁶ is absent or selected from the group consisting of S, T, C, E, Q, P and R, preferably is selected from the group consisting of E, Q and R; wherein AA⁷ is absent or is selected from the group consisting of S, T, C, E, Q, P and R, preferably is selected from the group consisting of S, C and P; and wherein at least one of AA¹, AA², AA³, AA⁴, AA⁵, AA⁶ or AA⁷ is not absent. In one particular example, PEP7 is selected from the group consisting of NDEGLEX (SEQ ID NO: 6447), SSVKXQP (SEQ ID NO: 6451) and RNVQXRP (SEQ ID NO: 6448).

[0433] In certain embodiments useful for inducing differentiation of mensenchymal or progenitor stem cells involved in the process of wound healing as defined herein, promoting wound healing, skin repair and cellular migration, PEP9 is a peptide of general formula AA¹-AA²-AA³-AA⁴-AA⁵-AA⁶-AA⁷-PEP5; wherein PEP5 is a peptide of formula PEP3-AA¹¹-AA¹²; wherein PEP3 is selected from the group consisting of VPT, SRV and TQV; wherein AA¹¹ is selected from the group consisting of E, K, Q, R, A, D, G and H, in particular is E, G, H and Q; wherein AA¹² is selected from the group consisting of L, M, T, E, Q and H, in particular is selected from the group consisting of E, Q, H and L; wherein AA¹, AA², AA³, AA⁴, and AA⁵ are independently absent or AA¹ as defined herein; wherein AA⁶ is absent or selected from the group consisting of S, T, C, E, Q, P and R, preferably is selected from the group consisting of E, Q and R; wherein AA⁷ is selected from the group consisting of S, T, C, E, Q, P and R, preferably is selected from the group consisting of S, C and P. In one particular example, PEP9 is selected from the group consisting of NDEGLEXVPTEE (SEQ ID NO: 6545), NDEGLEXVPTGQ (SEQ ID NO: 6546), SSVKXQPSRVHH (SEQ ID NO: 6565) and RNVQXRPTQVQL (SEQ ID NO: 6548).

[0434] In certain embodiments useful for inducing differentiation of mensenchymal or progenitor stem cells involved in the process of wound healing as defined herein, promoting wound healing, skin repair and cellular migration, PEP12 is a peptide of general formula PEP1-AA¹⁷-PEP11; wherein AA¹⁷ is selected from the group consisting of G, A, V, L, I, P, F, M, W, T and S (in particular is selected from the group consisting of M, I, L, V and T); wherein PEP1 is selected from the group consisting of SNIT (SEQ ID NO: 6362), RPVQ (SEQ ID NO: 6358) and RSVK (SEQ ID NO: 6359).

[0435] In certain embodiments useful for inducing differentiation of mensenchymal or progenitor stem cells involved in the process of wound healing as defined herein, promoting wound healing, skin repair and cellular migration, PEP11 is a peptide with 3 amino acids of general formula AA¹⁸-AA¹⁹-AA²⁰; wherein AA¹S is selected from the group consisting of L, V, Q, A and R, in particular is selected from the group consisting of Q, A and R; wherein AA¹ is selected from the group consisting of F, W, H, Y, I and K, in particular is I or K; wherein AA² is selected from the group consisting of L, F, Y, K, I, V and M, in particular is selected from the group consisting of M, V and I. In one particular example, PEP11 is selected from the group consisting of QIM, AKV and RKI.

[0436] In certain embodiments useful for inducing differentiation of mensenchymal or progenitor stem cells involved in the process of wound healing as defined herein, promoting wound healing, skin repair and cellular migration, PEP1 is selected from the group consisting of SNIT (SEQ ID NO: 6362), RPVQ (SEQ ID NO: 6358) and RSVK (SEQ ID NO: 6359); PEP11 is selected from the group consisting of QIM, AKV and RKI; and the pair PEP1:PEP11 is selected from the group consisting of SNIT (SEQ ID NO: 6362):QIM, RSVK (SEQ ID NO: 6359):KEVQV and RPVQ (SEQ ID NO: 6358):KKATV.

[0437] The definitions of “PEP” pairs and triplets e.g. PEP3:PEP1, PEP5:PEP12, or PEP7:PEP5:PEP1, also most particularly useful for inducing differentiation of mensenchymal or progenitor stem cells involved in the process of wound healing as defined herein, promoting wound healing, skin repair and cellular migration, are as already defined herein to the extent that PEP1, PEP3, PEP5, PEP7, PEP9, PEP11 and PEP12 are particularly useful for these applications as defined in the present wound healing section.

[0438] In certain embodiments useful for inducing differentiation of mensenchymal or progenitor stem cells involved in the process of wound healing as defined herein, promoting wound healing, skin repair and cellular migration, said GFR-binding compound is a synthetic molecule as defined herein in the definition section.

[0439] In certain embodiments useful for inducing differentiation of mensenchymal or progenitor stem cells involved in the process of wound healing as defined herein, promoting wound healing, skin repair and cellular migration, said GFR-binding compound is a synthetic peptide, or a variant or analog thereof, or a peptidomimetic.

[0440] Skin Regeneration and Anti-Aging

[0441] Certain embodiments of the invention are particularly useful for inducing differentiation of mensenchymal or progenitor stem cells from the fibroblast lineage, inducing skin tissue regeneration and tubular formation, preventing, attenuating, masking or removing wrinkles, firming the skin, preventing, decreasing or suppressing skin pigmentation, and protecting patients from skin tissue degeneration-related diseases, disorders, conditions or pathologies.

[0442] In certain embodiments useful for inducing differentiation of mensenchymal or progenitor stem cells from the fibroblast lineage, inducing skin tissue regeneration and tubular formation, preventing, attenuating, masking or removing wrinkles, firming the skin, preventing, decreasing or suppressing skin pigmentation, and protecting patients from skin tissue degeneration-related diseases, disorders, conditions or pathologies, PEP1 is selected from the group consisting of EPLP (SEQ ID NO: 6354), EPLT (SEQ ID NO: 6355), SNIT (SEQ ID NO: 6362), RSVK (SEQ ID NO: 6359) and RPVQ (SEQ ID NO: 6358).

[0443] In certain embodiments useful for inducing differentiation of mensenchymal or progenitor stem cells from the fibroblast lineage, inducing skin tissue regeneration and tubular formation, preventing, attenuating, masking or removing wrinkles, firming the skin, preventing, decreasing or suppressing skin pigmentation, and protecting patients from skin tissue degeneration-related diseases, disorders, conditions or pathologies, PEP3 is selected from the group consisting of VPT, APT, VPQ, VSO, SRV and TQV.

[0444] In certain embodiments useful for inducing differentiation of mensenchymal or progenitor stem cells from the fibroblast lineage, inducing skin tissue regeneration and tubular formation, preventing, attenuating, masking or removing wrinkles, firming the skin, preventing, decreasing or suppressing skin pigmentation, and protecting patients from skin tissue degeneration-related diseases, disorders, conditions or pathologies, PEP5 is a peptide of general formula PEP3-AA¹¹-AA¹²; wherein PEP3 is selected from the group consisting of VPT, APT, VPQ, VSO, SRV and TQV; wherein AA¹¹ is selected from the group consisting of E, K, Q, R, A, D, G and H, in particular is selected from the group consisting of E, K, Q, A, D and H; wherein AA¹² is selected from the group consisting of L, M, T, E, Q and H, in particular is selected from the group consisting of L, E and H. In one particular example, PEP5 is selected from the group consisting of VPTEL (SEQ ID NO: 6421), APTKL (SEQ ID NO: 6369), APTQL (SEQ ID NO: 6372), VPQAL (SEQ ID NO: 6410), VSQDL (SEQ ID NO: 6429), VPQDL (SEQ ID NO: 6411), VPTEE (SEQ ID NO: 6420), SRVHH (SEQ ID NO: 6382) and TQVQL (SEQ ID NO: 6393).

[0445] In certain embodiments useful for inducing differentiation of mensenchymal or progenitor stem cells from the fibroblast lineage, inducing skin tissue regeneration and tubular formation, preventing, attenuating, masking or removing wrinkles, firming the skin, preventing, decreasing or suppressing skin pigmentation, and protecting patients from skin tissue degeneration-related diseases, disorders, conditions or pathologies, PEP7 is an amino acid or a peptide with between two and seven amino acids of general formula AA¹-AA²-AA³-AA⁴-AA⁵-AA⁶-AA⁷ (SEQ ID NO: 6606); wherein AA¹, AA², AA³, AA⁴, and AA⁵ are independently absent or AA¹ as defined herein; wherein AA⁶ is absent or selected from the group consisting of S, T, C, E, Q, P and R, preferably is selected from the group consisting of C, S, T, E, R and Q; wherein AA⁷ is absent or is selected from the group consisting of S, T, C, E, Q, P and R, preferably is selected from the group consisting of S, C and P; and wherein at least one of AA¹, AA², AA³, AA⁴, AA⁵, AA⁶ or AA⁷ is not absent. In one particular example, PEP7 is selected from the group consisting of KIPKAXX (SEQ ID NO: 6445), SIPKAXX (SEQ ID NO: 6450), HVTKPTX (SEQ ID NO: 6443), YVPKPXX (SEQ ID NO: 6454), TVPKPXX (SEQ ID NO: 6453), ASAAPXX (SEQ ID NO: 6437), ASASPXX (SEQ ID NO: 6438), NDEGLEX (SEQ ID NO: 6447), SSVKXQP (SEQ ID NO: 6451) and RNVQXRP (SEQ ID NO: 6448).

[0446] In certain embodiments useful for inducing differentiation of mensenchymal or progenitor stem cells from the fibroblast lineage, inducing skin tissue regeneration and tubular formation, preventing, attenuating, masking or removing wrinkles, firming the skin, preventing, decreasing or suppressing skin pigmentation, and protecting patients from skin tissue degeneration-related diseases, disorders, conditions or pathologies, PEP9 is a peptide of general formula AA¹-AA²-AA³-AA⁴-AA⁵-AA⁶-AA⁷-PEP5; wherein PEP5 is a peptide of formula PEP3-AA¹¹-AA¹²; wherein PEP3 is selected from the group consisting of VPT, APT, VPQ, VSO, SRV and TQV; wherein AA¹¹ is selected from the group consisting of E, K, Q, R, A, D, G and H, in particular is selected from the group consisting of E, K, Q, A, D and H; wherein AA¹² is selected from the group consisting of L, M, T, E, Q and H, in particular is selected from the group consisting of L, E and H; wherein AA¹, AA², AA³, AA⁴, and AA⁵ are independently absent or AA¹ as defined herein; wherein AA⁶ is absent or selected from the group consisting of S, T, C, E, Q, P and R, preferably is selected from the group consisting of C, S, T, E, R and Q; wherein AA⁷ is selected from the group consisting of S, T, C, E, Q, P and R, preferably is selected from the group consisting of S, C and P. In one particular example, PEP9 is selected from the group consisting of KIPKAXXVPTEL (SEQ ID NO: 6535), SIPKAXXVPTEL (SEQ ID NO: 6563), HVTKPTXAPTKL (SEQ ID NO: 6511), YVPKPXXAPTKL (SEQ ID NO: 6583), TVPKPXXAPTQL (SEQ ID NO: 6575), ASAAPXXVPQAL (SEQ ID NO: 6468), ASASPXXVSQDL (SEQ ID NO: 6478), ASASPXXVPQDL (SEQ ID NO: 6476), NDEGLEXVPTEE (SEQ ID NO: 6545), SSVKXQPSRVHH (SEQ ID NO: 6565) and RNVQXRPTQVQL (SEQ ID NO: 6548).

[0447] In certain embodiments useful for inducing differentiation of mensenchymal or progenitor stem cells from the fibroblast lineage, inducing skin tissue regeneration and tubular formation, preventing, attenuating, masking or removing wrinkles, firming the skin, preventing, decreasing or suppressing skin pigmentation, and protecting patients from skin tissue degeneration-related diseases, disorders, conditions or pathologies, PEP12 is a peptide of general formula PEP1-AA¹⁷-PEP11; wherein AA¹⁷ is selected from the group consisting of G, A, V, L, I, P, F, M, W, T and S (in particular is selected from the group consisting of M, I, L, V and T); wherein PEP1 is selected from the group consisting of EPLP (SEQ ID NO: 6354), EPLT (SEQ ID NO: 6355), SNIT (SEQ ID NO: 6362), RSVK (SEQ ID NO: 6359) and RPVQ (SEQ ID NO: 6358).

[0448] In certain embodiments useful for inducing differentiation of mensenchymal or progenitor stem cells from the fibroblast lineage, inducing skin tissue regeneration and tubular formation, preventing, attenuating, masking or removing wrinkles, firming the skin, preventing, decreasing or suppressing skin pigmentation, and protecting patients from skin tissue degeneration-related diseases, disorders, conditions or pathologies, PEP11 is a peptide with 3 amino acids of general formula AA¹⁸-AA¹⁹-AA²⁰; wherein AA¹⁸ is selected from the group consisting of L, V, Q, A and R; wherein AA¹⁹ is selected from the group consisting of F, W, H, Y, I and K, in particular is selected from the group consisting of Y, I and K; wherein AA⁰ is selected from the group consisting of L, F, Y, K, I, V and M, in particular is selected from the group consisting of Y, M, V and I. In one particular example, PEP11 is selected from the group consisting of VYY, LYY, QIM, AKV and RKI.

[0449] In certain embodiments useful for inducing differentiation of mensenchymal or progenitor stem cells from the fibroblast lineage, inducing skin tissue regeneration and tubular formation, preventing, attenuating, masking or removing wrinkles, firming the skin, preventing, decreasing or suppressing skin pigmentation, and protecting patients from skin tissue degeneration-related diseases, disorders, conditions or pathologies, PEP1 is selected from the group consisting of EPLP (SEQ ID NO: 6354), EPLT (SEQ ID NO: 6355), SNIT (SEQ ID NO: 6362), RSVK (SEQ ID NO: 6359) and RPVQ (SEQ ID NO: 6358); PEP11 is selected from the group consisting of VYY, LYY, QIM, AKV and RKI; and the pair PEP1:PEP11 is selected from the group consisting of EPLP (SEQ ID NO: 6354):VYY, EPLT (SEQ ID NO: 6355):LYY, SNIT (SEQ ID NO: 6362):QIM, RSVK (SEQ ID NO: 6359):KEVQV and RPVQ (SEQ ID NO: 6358):KKATV.

[0450] The definitions of “PEP” pairs and triplets e.g. PEP3:PEP1, PEP5:PEP12, or PEP7:PEP5:PEP1, also most particularly useful for inducing differentiation of mensenchymal or progenitor stem cells from the fibroblast lineage, inducing skin tissue regeneration and tubular formation, preventing, attenuating, masking or removing wrinkles, firming the skin, preventing, decreasing or suppressing skin pigmentation, and protecting patients from skin tissue degeneration-related diseases, disorders, conditions or pathologies, are as already defined herein to the extent that PEP1, PEP3, PEP5, PEP7, PEP9, PEP11 and PEP12 are particularly useful for these applications as defined in the present skin regeneration section.

[0451] In certain embodiments useful for inducing differentiation of mensenchymal or progenitor stem cells from the fibroblast lineage, inducing skin tissue regeneration and tubular formation, preventing, attenuating, masking or removing wrinkles, firming the skin, preventing, decreasing or suppressing skin pigmentation, and protecting patients from skin tissue degeneration-related diseases, disorders, conditions or pathologies, said GFR-binding compound is a synthetic molecule as defined herein in the definition section.

[0452] In certain embodiments useful for inducing differentiation of mensenchymal or progenitor stem cells from the fibroblast lineage, inducing skin tissue regeneration and tubular formation, preventing, attenuating, masking or removing wrinkles, firming the skin, preventing, decreasing or suppressing skin pigmentation, and protecting patients from skin tissue degeneration-related diseases, disorders, conditions or pathologies, said GFR-binding compound is a synthetic peptide, or a variant or analog thereof, or a peptidomimetic.

[0453] Hair

[0454] Certain embodiments of the invention are particularly useful for inducing differentiation of mensenchymal or progenitor stem cells from the hair follicle cell lineage, hair follicle tissue regeneration and formation (hair growth), and for protecting from hair follicle-related diseases, disorders, conditions or pathologies.

[0455] In certain embodiments useful for inducing differentiation of mensenchymal or progenitor stem cells from the hair follicle cell lineage, hair follicle tissue regeneration and formation (hair growth), and for protecting from hair follicle-related diseases, disorders, conditions or pathologies, PEP1 is SSLS (SEQ ID NO: 6365).

[0456] In certain embodiments useful for inducing differentiation of mensenchymal or progenitor stem cells from the hair follicle cell lineage, hair follicle tissue regeneration and formation (hair growth), and for protecting from hair follicle-related diseases, disorders, conditions or pathologies, PEP3 is selected from the group consisting of VPT, VPE, APT, TPT, VPA, APV, VPQ, VSO and SRV.

[0457] In certain embodiments useful for inducing differentiation of mensenchymal or progenitor stem cells from the hair follicle cell lineage, hair follicle tissue regeneration and formation (hair growth), and for protecting from hair follicle-related diseases, disorders, conditions or pathologies, PEP5 is a peptide of general formula PEP3-AA¹¹-AA¹²; wherein PEP3 is selected from the group consisting of VPT, VPE, APT, TPT, VPA, APV, VPQ, VSO and SRV; wherein AA¹¹ is selected from the group consisting of E, K, Q, R, A, D, G and H, in particular is selected from the group consisting of E, K, Q, R, A, D and H; wherein AA¹² is selected from the group consisting of L, M, T, E, Q and H, in particular is selected from the group consisting of L, M, T, E and H. In one particular example, PEP5 is selected from the group consisting of VPTEL (SEQ ID NO: 6421), VPEKM (SEQ ID NO: 6406), APTKL (SEQ ID NO: 6369), APTQL (SEQ ID NO: 6372), VPTKL (SEQ ID NO: 6423), TPTKM (SEQ ID NO: 6388), VPARL (SEQ ID NO: 6401), VPTRL (SEQ ID NO: 6427), APVKT (SEQ ID NO: 6379), VPQAL (SEQ ID NO: 6410), VSODL (SEQ ID NO: 6429), VPQDL (SEQ ID NO: 6411), VPTEE (SEQ ID NO: 6420) and SRVHH (SEQ ID NO: 6382).

[0458] In certain embodiments useful for inducing differentiation of mensenchymal or progenitor stem cells from the hair follicle cell lineage, hair follicle tissue regeneration and formation (hair growth), and for protecting from hair follicle-related diseases, disorders, conditions or pathologies, PEP7 is an amino acid or a peptide with between two and seven amino acids of general formula AA¹-AA²-AA³-AA⁴-AA⁵-AA⁶-AA⁷ (SEQ ID NO: 6606); wherein AA¹, AA², AA³, AA⁴, and AA⁵ are independently absent or AA¹ as defined herein; wherein AA⁶ is absent or selected from the group consisting of S, T, C, E, Q, P and R, preferably is selected from the group consisting of C, S, T, E and Q; wherein AA⁷ is absent or is selected from the group consisting of S, T, C, E, Q, P and R, preferably is selected from the group consisting of S, C and P; and wherein at least one of AA¹, AA², AA³, AA⁴, AA⁵, AA or AA⁷ is not absent. In one particular example, PEP7 is selected from the group consisting of KIPKAXX (SEQ ID NO: 6445), GIPEPXX (SEQ ID NO: 6440), SIPKAXX (SEQ ID NO: 6450), HVTKPTX (SEQ ID NO: 6443), YVPKPXX (SEQ ID NO: 6454), TVPKPXX (SEQ ID NO: 6453), AVPKAXX (SEQ ID NO: 6439), KVGKAXX (SEQ ID NO: 6446), KASKAXX (SEQ ID NO: 6444), GSAGPXX (SEQ ID NO: 6441), AAPASXX (SEQ ID NO: 6436), STPPTXX (SEQ ID NO: 6452), HVPKPXX (SEQ ID NO: 6442), RVPSTXX (SEQ ID NO: 6449), ASAAPXX (SEQ ID NO: 6437), ASASPXX (SEQ ID NO: 6438), NDEGLEX (SEQ ID NO: 6447) and SSVKXQP (SEQ ID NO: 6451).

[0459] In certain embodiments useful for inducing differentiation of mensenchymal or progenitor stem cells from the hair follicle cell lineage, hair follicle tissue regeneration and formation (hair growth), and for protecting from hair follicle-related diseases, disorders, conditions or pathologies, PEP9 is a peptide of general formula AA¹-AA²-AA³-AA⁴-AA⁵-AA⁶-AA⁷-PEP5; wherein PEP5 is a peptide of formula PEP3-AA¹¹-AA¹²; wherein PEP3 is selected from the group consisting of VPT, VPE, APT, TPT, VPA, APV, VPQ, VSO and SRV; wherein AA¹¹ is selected from the group consisting of E, K, Q, R, A, D, G and H, in particular is selected from the group consisting of E, K, Q, R, A, D and H; wherein AA¹² is selected from the group consisting of L, M, T, E, Q and H, in particular is selected from the group consisting of L, M, T, E and H; wherein AA¹, AA², AA³, AA⁴, and AA⁵ are independently absent or AA¹ as defined herein; wherein AA⁶ is absent or selected from the group consisting of S, T, C, E, Q, P and R, preferably is selected from the group consisting of C, S, T, E and Q; wherein AA⁷ is selected from the group consisting of S, T, C, E, Q, P and R, preferably is selected from the group consisting of S, C and P. In one particular example, PEP9 is selected from the group consisting of KIPKAXXVPTEL (SEQ ID NO: 6535), GIPEPXXVPEKM (SEQ ID NO: 6491), SIPKAXXVPTEL (SEQ ID NO: 6563), HVTKPTXAPTKL (SEQ ID NO: 6511), YVPKPXXAPTKL (SEQ ID NO: 6583), TVPKPXXAPTQL (SEQ ID NO: 6575), AVPKAXXAPTKL (SEQ ID NO: 6479), KVGKAXXVPTKL (SEQ ID NO: 6543), KASKAXXVPTKL (SEQ ID NO: 6527), GSAGPXXTPTKM (SEQ ID NO: 6497), AAPASXXVPARL (SEQ ID NO: 6458), STPPTXXVPTRL (SEQ ID NO: 6573), HVPKPXXAPTKL (SEQ ID NO: 6503), RVPSTXXAPVKT (SEQ ID NO: 6550), ASAAPXXVPQAL (SEQ ID NO: 6468), ASASPXXVSQDL (SEQ ID NO: 6478), ASASPXXVPQDL (SEQ ID NO: 6476), NDEGLEXVPTEE (SEQ ID NO: 6545) and SSVKXQPSRVHH (SEQ ID NO: 6565).

[0460] In certain embodiments useful for inducing differentiation of mensenchymal or progenitor stem cells from the hair follicle cell lineage, hair follicle tissue regeneration and formation (hair growth), and for protecting from hair follicle-related diseases, disorders, conditions or pathologies, PEP12 is a peptide of general formula PEP1-AA¹⁷-PEP11; wherein AA¹⁷ is selected from the group consisting of G, A, V, L, I, P, F, M, W, T and S (in particular is selected from the group consisting of M, I, L, V and T); wherein PEP1 is SSLS (SEQ ID NO: 6365).

[0461] In certain embodiments useful for inducing differentiation of mensenchymal or progenitor stem cells from the hair follicle cell lineage, hair follicle tissue regeneration and formation (hair growth), and for protecting from hair follicle-related diseases, disorders, conditions or pathologies, PEP11 is a peptide with 3 amino acids of general formula AA¹⁸-AA¹⁹-AA²⁰; wherein AA¹⁹ is selected from the group consisting of L, V, Q, A and R, in particular is L; wherein AA¹⁹ is selected from the group consisting of F, W, H, Y, I and K, in particular is F; wherein AA² is selected from the group consisting of L, F, Y, K, I, V and M, in particular is F. In one particular example, PEP11 is LFF.

[0462] In certain embodiments useful for inducing differentiation of mensenchymal or progenitor stem cells from the hair follicle cell lineage, hair follicle tissue regeneration and formation (hair growth), and for protecting from hair follicle-related diseases, disorders, conditions or pathologies, PEP1 is SSLS (SEQ ID NO: 6365) and PEP11 is LFF.

[0463] The definitions of “PEP” pairs and triplets e.g. PEP3:PEP1, PEP5:PEP12, or PEP7:PEP5:PEP1, also most particularly useful for inducing differentiation of mensenchymal or progenitor stem cells from the hair follicle cell lineage, hair follicle tissue regeneration and formation (hair growth), and for protecting from hair follicle-related diseases, disorders, conditions or pathologies, are as already defined herein to the extent that PEP1, PEP3, PEP5, PEP7, PEP9, PEP11 and PEP12 are particularly useful for these applications as defined in the present fertility and reproduction section.

[0464] In certain embodiments useful for inducing differentiation of mensenchymal or progenitor stem cells from the hair follicle cell lineage, hair follicle tissue regeneration and formation (hair growth), and for protecting from hair follicle-related diseases, disorders, conditions or pathologies, said GFR-binding compound is a synthetic molecule as defined herein in the definition section.

[0465] In certain embodiments useful for inducing differentiation of mensenchymal or progenitor stem cells from the hair follicle cell lineage, hair follicle tissue regeneration and formation (hair growth), and for protecting from hair follicle-related diseases, disorders, conditions or pathologies, said GFR-binding compound is a synthetic peptide, or a variant or analog thereof, or a peptidomimetic.

[0466] Fertility and Reproduction

[0467] Certain embodiments of the invention are particularly useful for inducing differentiation of mensenchymal or progenitor stem cells from the reproduction system lineage, enhancing female fertility, treating, preventing, decreasing or suppressing female infertility or any diseases, conditions, disorders or pathologies related thereof.

[0468] In certain embodiments useful for inducing differentiation of mensenchymal or progenitor stem cells from the reproduction system lineage, enhancing female fertility, treating, preventing, decreasing or suppressing female infertility or any diseases, conditions, disorders or pathologies related thereof, PEP1 is NAIS (SEQ ID NO: 6357).

[0469] In certain embodiments useful for inducing differentiation of mensenchymal or progenitor stem cells from the reproduction system lineage, enhancing female fertility, treating, preventing, decreasing or suppressing female infertility or any diseases, conditions, disorders or pathologies related thereof, PEP3 is selected from the group consisting of VPT, APT, TPT, VPA and APV.

[0470] In certain embodiments useful for inducing differentiation of mensenchymal or progenitor stem cells from the reproduction system lineage, enhancing female fertility, treating, preventing, decreasing or suppressing female infertility or any diseases, conditions, disorders or pathologies related thereof, PEP5 is a peptide of general formula PEP3-AA¹¹-AA¹²; wherein PEP3 is selected from the group consisting of VPT, APT, TPT, VPA and APV; wherein AA¹¹ is selected from the group consisting of E, K, Q, R, A, D, G and H, in particular is selected from the group consisting of E, K, Q and R; wherein AA¹² is selected from the group consisting of L, M, T, E, Q and H, in particular is selected from the group consisting of L, M and T. In one particular example, PEP5 is selected from the group consisting of VPTEL (SEQ ID NO: 6421), APTKL (SEQ ID NO: 6369), APTQL (SEQ ID NO: 6372), VPTKL (SEQ ID NO: 6423), TPTKM (SEQ ID NO: 6388), VPARL (SEQ ID NO: 6401), VPTRL (SEQ ID NO: 6427) and APVKT (SEQ ID NO: 6379).

[0471] In certain embodiments useful for inducing differentiation of mensenchymal or progenitor stem cells from the reproduction system lineage, enhancing female fertility, treating, preventing, decreasing or suppressing female infertility or any diseases, conditions, disorders or pathologies related thereof, PEP7 is an amino acid or a peptide with between two and seven amino acids of general formula AA¹-AA²-AA³-AA⁴-AA⁵-AA⁶-AA⁷ (SEQ ID NO: 6606); wherein AA¹, AA², AA³, AA⁴, and AA⁵ are independently absent or AA¹ as defined herein; wherein AA^{e} is absent or selected from the group consisting of S, T, C, E, Q, P and R, preferably is selected from the group consisting of C, S and T; wherein AA⁷ is absent or is selected from the group consisting of S, T, C, E, Q, P and R, preferably is selected from the group consisting of S and C; and wherein at least one of AA, AA², AA³, AA⁴, AA⁵, AA or AA⁷ is not absent. In one particular example, PEP7 is selected from the group consisting of KIPKAXX (SEQ ID NO: 6445), SIPKAXX (SEQ ID NO: 6450), HVTKPTX (SEQ ID NO: 6443), YVPKPXX (SEQ ID NO: 6454), TVPKPXX (SEQ ID NO: 6453), AVPKAXX (SEQ ID NO: 6439), KVGKAXX (SEQ ID NO: 6446), KASKAXX (SEQ ID NO: 6444), GSAGPXX (SEQ ID NO: 6441), AAPASXX (SEQ ID NO: 6436), STPPTXX (SEQ ID NO: 6452), HVPKPXX (SEQ ID NO: 6442) and RVPSTXX (SEQ ID NO: 6449).

[0472] In certain embodiments useful for inducing differentiation of mensenchymal or progenitor stem cells from the reproduction system lineage, enhancing female fertility, treating, preventing, decreasing or suppressing female infertility or any diseases, conditions, disorders or pathologies related thereof, PEP9 is a peptide of general formula AA¹-AA²-AA³-AA⁴-AA⁵-AA⁶-AA⁷-PEP5; wherein PEP5 is a peptide of formula PEP3-AA¹¹-AA¹²; wherein PEP3 is selected from the group consisting of VPT, APT, TPT, VPA and APV; wherein AA¹¹ is selected from the group consisting of E, K, Q, R, A, D, G and H, in particular is selected from the group consisting of E, K, Q and R; wherein AA¹² is selected from the group consisting of L, M, T, E, Q and H, in particular is selected from the group consisting of L, M and T; wherein AA¹, AA², AA³, AA⁴, and AA⁵ are independently absent or AA¹ as defined herein; wherein AA¹⁷ is absent or selected from the group consisting of S, T, C, E, Q, P and R, preferably is selected from the group consisting of C, S and T; wherein AA⁷ is selected from the group consisting of S, T, C, E, Q, P and R, preferably is selected from the group consisting of S and C. In one particular example, PEP9 is selected from the group consisting of KIPKAXXVPTEL (SEQ ID NO: 6535), SIPKAXXVPTEL (SEQ ID NO: 6563), HVTKPTXAPTKL (SEQ ID NO: 6511), YVPKPXXAPTKL (SEQ ID NO: 6583), TVPKPXXAPTQL (SEQ ID NO: 6575), AVPKAXXAPTKL (SEQ ID NO: 6479), KVGKAXXVPTKL (SEQ ID NO: 6543), KASKAXXVPTKL (SEQ ID NO: 6527), GSAGPXXTPTKM (SEQ ID NO: 6497), AAPASXXVPARL (SEQ ID NO: 6458), STPPTXXVPTRL (SEQ ID NO: 6573), HVPKPXXAPTKL (SEQ ID NO: 6503) and RVPSTXXAPVKT (SEQ ID NO: 6550).

[0473] In certain embodiments useful for inducing differentiation of mensenchymal or progenitor stem cells from the reproduction system lineage, enhancing female fertility, treating, preventing, decreasing or suppressing female infertility or any diseases, conditions, disorders or pathologies related thereof, PEP12 is a peptide of general formula PEP1-AA¹⁷-PEP11; wherein AA¹⁷ is selected from the group consisting of G, A, V, L, I, P, F, M, W, T and S (in particular is selected from the group consisting of M, I, L, V and T); wherein PEP1 is NAIS (SEQ ID NO: 6357).

[0474] In certain embodiments useful for inducing differentiation of mensenchymal or progenitor stem cells from the reproduction system lineage, enhancing female fertility, treating, preventing, decreasing or suppressing female infertility or any diseases, conditions, disorders or pathologies related thereof, PEP11 is a peptide with 3 amino acids of general formula AA¹⁸-AA¹⁹-AA²⁰; wherein AA¹⁸ is selected from the group consisting of L, V, Q, A and R, in particular is L; wherein AA¹⁹ is selected from the group consisting of F, W, H, Y, I and K, in particular is Y; wherein AA²⁰ is selected from the group consisting of L, F, Y, K, I, V and M, in particular is F. In one particular example, PEP11 is LYF.

[0475] In certain embodiments useful for inducing differentiation of mensenchymal or progenitor stem cells from the reproduction system lineage, enhancing female fertility, treating, preventing, decreasing or suppressing female infertility or any diseases, conditions, disorders or pathologies related thereof, PEP1 is NAIS (SEQ ID NO: 6357) and PEP11 is LYF.

[0476] The definitions of “PEP” pairs and triplets e.g. PEP3:PEP1, PEP5:PEP12, or PEP7:PEP5:PEP1, also most particularly useful for inducing differentiation of mensenchymal or progenitor stem cells from the reproduction system lineage, enhancing female fertility, treating, preventing, decreasing or suppressing female infertility or any diseases, conditions, disorders or pathologies related thereof, are as already defined herein to the extent that PEP1, PEP3, PEP5, PEP7, PEP9, PEP11 and PEP12 are particularly useful for these applications as defined in the present fertility and reproduction section.

[0477] In certain embodiments useful for inducing differentiation of mensenchymal or progenitor stem cells from the reproduction system lineage, enhancing female fertility, treating, preventing, decreasing or suppressing female infertility or any diseases, conditions, disorders or pathologies related thereof, said GFR-binding compound is a synthetic molecule as defined herein in the definition section.

[0478] In certain embodiments useful for inducing differentiation of mensenchymal or progenitor stem cells from the reproduction system lineage, enhancing female fertility, treating, preventing, decreasing or suppressing female infertility or any diseases, conditions, disorders or pathologies related thereof, said GFR-binding compound is a synthetic peptide, or a variant or analog thereof, or a peptidomimetic.

[0479] Lung

[0480] Certain embodiments of the invention are particularly useful for inducing differentiation of mensenchymal or progenitor stem cells from the lung cell lineage, regenerating lung tissues, and protecting patients from lung tissue degeneration-related diseases, conditions, disorders or pathologies.

[0481] In certain embodiments useful for inducing differentiation of mensenchymal or progenitor stem cells from the lung cell lineage, regenerating lung tissues, and protecting patients from lung tissue degeneration-related diseases, conditions, disorders or pathologies, PEP1 is selected from the group consisting of NAIS (SEQ ID NO: 6357), SATS (SEQ ID NO: 6361), SPIS (SEQ ID NO: 6364), EPIS (SEQ ID NO: 6353) and SPIN (SEQ ID NO: 6363).

[0482] In certain embodiments useful for inducing differentiation of mensenchymal or progenitor stem cells from the lung cell lineage, regenerating lung tissues, and protecting patients from lung tissue degeneration-related diseases, conditions, disorders or pathologies, PEP3 is selected from the group consisting of VPT, VPE, APT, TPT, VPA, APV, VPQ and VSO.

[0483] In certain embodiments useful for inducing differentiation of mensenchymal or progenitor stem cells from the lung cell lineage, regenerating lung tissues, and protecting patients from lung tissue degeneration-related diseases, conditions, disorders or pathologies, PEP5 is a peptide of general formula PEP3-AA¹¹-AA¹²; wherein PEP3 is selected from the group consisting of VPT, VPE, APT, TPT, VPA, APV, VPQ and VSQ; wherein AA¹¹ is selected from the group consisting of E, K, Q, R, A, D, G and H, in particular is selected from the group consisting of E, K, Q, R, A and D; wherein AA¹² is selected from the group consisting of L, M, T, E, Q and H, in particular selected from the group consisting of L, M and T. In one particular example, PEP5 is selected from the group consisting of VPTEL (SEQ ID NO: 6421), VPEKM (SEQ ID NO: 6406), APTKL (SEQ ID NO: 6369), APTQL (SEQ ID NO: 6372), VPTKL (SEQ ID NO: 6423), TPTKM (SEQ ID NO: 6388), VPARL (SEQ ID NO: 6401), VPTRL (SEQ ID NO: 6427), APVKT (SEQ ID NO: 6379), VPQAL (SEQ ID NO: 6410), VSODL (SEQ ID NO: 6429) and VPQDL (SEQ ID NO: 6411).

[0484] In certain embodiments useful for inducing differentiation of mensenchymal or progenitor stem cells from the lung cell lineage, regenerating lung tissues, and protecting patients from lung tissue degeneration-related diseases, conditions, disorders or pathologies, PEP7 is an amino acid or a peptide with between two and seven amino acids of general formula AA¹-AA²-AA³-AA⁴-AA⁵-AA⁶-AA⁷ (SEQ ID NO: 6606); wherein AA¹, AA², AA³, AA⁴, and AA⁵ are independently absent or AA¹ as defined herein; wherein AA^{e} is absent or selected from the group consisting of S, T, C, E, Q, P and R, preferably is selected from the group consisting of C, S and T; wherein AA⁷ is absent or is selected from the group consisting of S, T, C, E, Q, P and R, preferably is C or S; and wherein at least one of AA¹, AA², AA³, AA⁴, AA⁵, AA^{e} or AA⁷ is not absent. In one particular example, PEP7 is selected from the group consisting of KIPKAXX (SEQ ID NO: 6445), GIPEPXX (SEQ ID NO: 6440), SIPKAXX (SEQ ID NO: 6450), HVTKPTX (SEQ ID NO: 6443), YVPKPXX (SEQ ID NO: 6454), TVPKPXX (SEQ ID NO: 6453), AVPKAXX (SEQ ID NO: 6439), KVGKAXX (SEQ ID NO: 6446), KASKAXX (SEQ ID NO: 6444), GSAGPXX (SEQ ID NO: 6441), AAPASXX (SEQ ID NO: 6436), STPPTXX (SEQ ID NO: 6452), HVPKPXX (SEQ ID NO: 6442), RVPSTXX (SEQ ID NO: 6449), ASAAPXX (SEQ ID NO: 6437) and ASASPXX (SEQ ID NO: 6438).

[0485] In certain embodiments useful for inducing differentiation of mensenchymal or progenitor stem cells from the lung cell lineage, regenerating lung tissues, and protecting patients from lung tissue degeneration-related diseases, conditions, disorders or pathologies, PEP9 is a peptide of general formula AA¹-AA²-AA³-AA⁴-AA⁵-AA⁶-AA⁷-PEP5; wherein PEP5 is a peptide of formula PEP3-AA¹¹-AA¹²; wherein PEP3 is selected from the group consisting of VPT, VPE, APT, TPT, VPA, APV, VPQ and VSO; wherein AA¹¹ is selected from the group consisting of E, K, Q, R, A, D, G and H, in particular E, K, Q, R, A and D; wherein AA¹² is selected from the group consisting of L, M, T, E, Q and H, in particular selected from the group consisting of L, M and T; wherein AA¹, AA², AA³, AA⁴, and AA⁵ are independently absent or AA¹ as defined herein; wherein AA⁶ is absent or selected from the group consisting of S, T, C, E, Q, P and R, preferably is selected from the group consisting of C, S and T; wherein AA⁷ is selected from the group consisting of S, T, C, E, Q, P and R, preferably is C or S. In one particular example, PEP9 is selected from the group consisting of KIPKAXXVPTEL (SEQ ID NO: 6535), GIPEPXXVPEKM (SEQ ID NO: 6491), SIPKAXXVPTEL (SEQ ID NO: 6563), HVTKPTXAPTKL (SEQ ID NO: 6511), YVPKPXXAPTKL (SEQ ID NO: 6583), TVPKPXXAPTQL (SEQ ID NO: 6575), AVPKAXXAPTKL (SEQ ID NO: 6479), KVGKAXXVPTKL (SEQ ID NO: 6543), KASKAXXVPTKL (SEQ ID NO: 6527), GSAGPXXTPTKM (SEQ ID NO: 6497), AAPASXXVPARL (SEQ ID NO: 6458), STPPTXXVPTRL (SEQ ID NO: 6573), HVPKPXXAPTKL (SEQ ID NO: 6503), RVPSTXXAPVKT (SEQ ID NO: 6550), ASAAPXXVPQAL (SEQ ID NO: 6468), ASASPXXVSQDL (SEQ ID NO: 6478) and ASASPXXVPQDL (SEQ ID NO: 6476).

[0486] In certain embodiments useful for inducing differentiation of mensenchymal or progenitor stem cells from the lung cell lineage, regenerating lung tissues, and protecting patients from lung tissue degeneration-related diseases, conditions, disorders or pathologies, PEP12 is a peptide of general formula PEP1-AA¹⁷-PEP11; wherein AA¹⁷ is selected from the group consisting of G, A, V, L, I, P, F, M, W, T and S (in particular is selected from the group consisting of M, I, L, V and T); wherein PEP1 is selected from the group consisting of NAIS (SEQ ID NO: 6357), SATS (SEQ ID NO: 6361), SPIS (SEQ ID NO: 6364), EPIS (SEQ ID NO: 6353) and SPIN (SEQ ID NO: 6363).

[0487] In certain embodiments useful for inducing differentiation of mensenchymal or progenitor stem cells from the lung cell lineage, regenerating lung tissues, and protecting patients from lung tissue degeneration-related diseases, conditions, disorders or pathologies, PEP11 is a peptide with 3 amino acids of general formula AA¹⁸-AA¹⁹-AA²⁰; wherein AA¹⁸ is selected from the group consisting of L, V, Q, A and R, in particular is L; wherein AA¹⁹ is selected from the group consisting of F, W, H and Y (in particular is a polar aromatic amino acid such as Y); wherein AA² is selected from the group consisting of L, F, Y, K, I, V and M, in particular is selected from the group consisting of L, F, Y, and K. In one particular example, PEP11 is selected from the group consisting of LYF, LYY, LYK and LYL.

[0488] In certain embodiments useful for inducing differentiation of mensenchymal or progenitor stem cells from the lung cell lineage, regenerating lung tissues, and protecting patients from lung tissue degeneration-related diseases, conditions, disorders or pathologies, PEP1 is selected from the group consisting of NAIS (SEQ ID NO: 6357), SATS (SEQ ID NO: 6361), SPIS (SEQ ID NO: 6364), EPIS (SEQ ID NO: 6353) and SPIN (SEQ ID NO: 6363); PEP11 is selected from the group consisting of LYF, LYY, LYK and LYL; and the pair PEP1:PEP11 is selected from the group consisting of NAIS (SEQ ID NO: 6357):LYF, SATS (SEQ ID NO: 6361):LYY, SPIS (SEQ ID NO: 6364):LYK, EPIS (SEQ ID NO: 6353):LYL and SPIN (SEQ ID NO: 6363):LYF.

[0489] The definitions of “PEP” pairs and triplets e.g. PEP3:PEP1, PEP5:PEP12, or PEP7:PEP5:PEP1, also most particularly useful for inducing differentiation of mensenchymal or progenitor stem cells from the lung cell lineage, regenerating lung tissues, and protecting patients from lung tissue degeneration-related diseases, conditions, disorders or pathologies, are as already defined herein to the extent that PEP1, PEP3, PEP5, PEP7, PEP9, PEP11 and PEP12 are particularly useful for these applications as defined in the present lung section.

[0490] In certain embodiments useful for inducing differentiation of mensenchymal or progenitor stem cells from the lung cell lineage, regenerating lung tissues, and protecting patients from lung tissue degeneration-related diseases, conditions, disorders or pathologies, said GFR-binding compound is a synthetic molecule as defined herein in the definition section.

[0491] In certain embodiments useful for inducing differentiation of mensenchymal or progenitor stem cells from the lung cell lineage, regenerating lung tissues, and protecting patients from lung tissue degeneration-related diseases, conditions, disorders or pathologies, said GFR-binding compound is a synthetic peptide, or a variant or analog thereof, or a peptidomimetic.

[0492] Muscle

[0493] Certain embodiments of the invention are particularly useful for inducing differentiation of mensenchymal or progenitor stem cells from the muscle cell lineage, regenerating muscle tissues, enhancing of myogenesis, reinforcing muscle tissues, repairing damaged muscles, and protecting a subject from one or more muscle tissue degeneration-related diseases, disorders, conditions or pathologies.

[0494] In certain embodiments useful for inducing differentiation of mensenchymal or progenitor stem cells from the muscle cell lineage, regenerating muscle tissues, enhancing of myogenesis, reinforcing muscle tissues, repairing damaged muscles, and protecting a subject from one or more muscle tissue degeneration-related diseases, disorders, conditions or pathologies, PEP1 is RSVK (SEQ ID NO: 6359) or RPVQ (SEQ ID NO: 6358).

[0495] In certain embodiments useful for inducing differentiation of mensenchymal or progenitor stem cells from the muscle cell lineage, regenerating muscle tissues, enhancing of myogenesis, reinforcing muscle tissues, repairing damaged muscles, and protecting a subject from one or more muscle tissue degeneration-related diseases, disorders, conditions or pathologies, PEP3 is selected from the group consisting of VPQ, VSO and VPT.

[0496] In certain embodiments useful for inducing differentiation of mensenchymal or progenitor stem cells from the muscle cell lineage, regenerating muscle tissues, enhancing of myogenesis, reinforcing muscle tissues, repairing damaged muscles, and protecting a subject from one or more muscle tissue degeneration-related diseases, disorders, conditions or pathologies, PEP5 is a peptide of general formula PEP3-AA¹¹-AA¹²; wherein PEP3 is selected from the group consisting of VPQ, VSO and VPT; wherein AA¹¹ is selected from the group consisting of E, K, Q, R, A, D, G and H, in particular A, D, E and G; wherein AA¹² is selected from the group consisting of L, M, T, E, Q and H, in particular L, E and Q. In one particular example, PEP5 is selected from the group consisting of VPQAL (SEQ ID NO: 6410), VSQDL (SEQ ID NO: 6429), VPQDL (SEQ ID NO: 6411), VPTEE (SEQ ID NO: 6420) and VPTGQ (SEQ ID NO: 6422).

[0497] In certain embodiments useful for inducing differentiation of mensenchymal or progenitor stem cells from the muscle cell lineage, regenerating muscle tissues, enhancing of myogenesis, reinforcing muscle tissues, repairing damaged muscles, and protecting a subject from one or more muscle tissue degeneration-related diseases, disorders, conditions or pathologies, PEP7 is an amino acid or a peptide with between two and seven amino acids of general formula AA¹-AA²-AA³-AA⁴-AA⁵-AA⁶-AA⁷ (SEQ ID NO: 6606); wherein AA¹, AA², AA³, AA⁴, and AA⁵ are independently absent or AA¹ as defined herein; wherein AA⁶ is absent or selected from the group consisting of S, T, C, E, Q, P and R, preferably C, S, or E; wherein AA⁷ is absent or is selected from the group consisting of S, T, C, E, Q, P and R, preferably is S or C; and wherein at least one of AA, AA², AA³, AA⁴, AA⁵, AA or AA⁷ is not absent. In one particular example, PEP7 is selected from the group consisting of ASAAPXX (SEQ ID NO: 6437), ASASPXX (SEQ ID NO: 6438) and NDEGLEX (SEQ ID NO: 6447).

[0498] In certain embodiments useful for inducing differentiation of mensenchymal or progenitor stem cells from the muscle cell lineage, regenerating muscle tissues, enhancing of myogenesis, reinforcing muscle tissues, repairing damaged muscles, and protecting a subject from one or more muscle tissue degeneration-related diseases, disorders, conditions or pathologies, PEP9 is a peptide of general formula AA¹-AA²-AA³-AA⁴-AA⁵-AA⁶-AA⁷-PEP5; wherein PEP5 is a peptide of formula PEP3-AA¹¹-AA¹²; wherein PEP3 is selected from the group consisting of VPQ, VSQ and VPT; wherein AA¹¹ is selected from the group consisting of E, K, Q, R, A, D, G and H, in particular A, D, E and G; wherein AA¹² is selected from the group consisting of L, M, T, E, Q and H, in particular L, E and Q; wherein AA¹, AA², AA³, AA⁴, and AA⁵ are independently absent or AA¹ as defined herein; wherein AA⁶ is absent or selected from the group consisting of S, T, C, E, Q, P and R, preferably C, S, or E; wherein AA⁷ is selected from the group consisting of S, T, C, E, Q, P and R, preferably is S or C. In one particular example, PEP9 is selected from the group consisting of ASAAPXXVPQAL (SEQ ID NO: 6468), ASASPXXVSQDL (SEQ ID NO: 6478), ASASPXXVPQDL (SEQ ID NO: 6476), NDEGLEXVPTEE (SEQ ID NO: 6545) and NDEGLEXVPTGQ (SEQ ID NO: 6546).

[0499] In certain embodiments useful for inducing differentiation of mensenchymal or progenitor stem cells from the muscle cell lineage, regenerating muscle tissues, enhancing of myogenesis, reinforcing muscle tissues, repairing damaged muscles, and protecting a subject from one or more muscle tissue degeneration-related diseases, disorders, conditions or pathologies, PEP12 is a peptide of general formula PEP1-AA¹⁷-PEP11; wherein AA¹⁷ is selected from the group consisting of G, A, V, L, I, P, F, M, W, T and S (in particular is I or M); wherein PEP1 is RSVK (SEQ ID NO: 6359) or RPVQ (SEQ ID NO: 6358).

[0500] In certain embodiments useful for inducing differentiation of mensenchymal or progenitor stem cells from the muscle cell lineage, regenerating muscle tissues, enhancing of myogenesis, reinforcing muscle tissues, repairing damaged muscles, and protecting a subject from one or more muscle tissue degeneration-related diseases, disorders, conditions or pathologies, PEP11 is a peptide with 3 amino acids of general formula AA¹⁸-AA¹⁹-AA²⁰; wherein AA¹⁸ is selected from the group consisting of L, V, Q, A and R, in particular is A or R; wherein AA¹⁹ is selected from the group consisting of AA^{VII} amino acids (in particular is K); wherein AA²⁰ is selected from the group consisting of L, F, Y, K, I, V and M, in particular is V or I. In one particular example, PEP11 is AKV or RKI.

[0501] In certain embodiments useful for inducing differentiation of mensenchymal or progenitor stem cells from the muscle cell lineage, regenerating muscle tissues, enhancing of myogenesis, reinforcing muscle tissues, repairing damaged muscles, and protecting a subject from one or more muscle tissue degeneration-related diseases, disorders, conditions or pathologies, PEP1 is RSVK (SEQ ID NO: 6359) or RPVQ (SEQ ID NO: 6358); PEP11 is is AKV or RKI; and the pair PEP1:PEP11 is RSVK (SEQ ID NO: 6359):AKV or RPVQ (SEQ ID NO: 6358):RKI.

[0502] The definitions of “PEP” pairs and triplets e.g. PEP3:PEP1, PEP5:PEP12, or PEP7:PEP5:PEP1, also most particularly embodiments useful for inducing differentiation of mensenchymal or progenitor stem cells from the muscle cell lineage, regenerating muscle tissues, enhancing of myogenesis, reinforcing muscle tissues, repairing damaged muscles, and protecting a subject from one or more muscle tissue degeneration-related diseases, disorders, conditions or pathologies, are as already defined herein to the extent that PEP1, PEP3, PEP5, PEP7, PEP9, PEP11 and PEP12 are particularly useful for these applications as defined in the present muscle section.

[0503] In certain embodiments useful for inducing differentiation of mensenchymal or progenitor stem cells from the muscle cell lineage, regenerating muscle tissues, enhancing of myogenesis, reinforcing muscle tissues, repairing damaged muscles, and protecting a subject from one or more muscle tissue degeneration-related diseases, disorders, conditions or pathologies, said GFR-binding compound is a synthetic molecule as defined herein in the definition section.

[0504] In certain embodiments useful for inducing differentiation of mensenchymal or progenitor stem cells from the muscle cell lineage, regenerating muscle tissues, enhancing of myogenesis, reinforcing muscle tissues, repairing damaged muscles, and protecting a subject from one or more muscle tissue degeneration-related diseases, disorders, conditions or pathologies, said GFR-binding compound is a synthetic peptide, or a variant or analog thereof, or a peptidomimetic.

[0505] Blood

[0506] Certain embodiments of the invention are particularly useful for inducing differentiation of mensenchymal or progenitor stem cells from the blood cell lineage, regenerating blood tissues, and protecting patients from blood cell degeneration-related disease, conditions, disorders or pathologies.

[0507] In certain embodiments useful for inducing differentiation of mensenchymal or progenitor stem cells from the blood cell lineage, regenerating blood tissues, and protecting patients from blood cell degeneration-related disease, conditions, disorders or pathologies, PEP1 is SNIT (SEQ ID NO: 6362).

[0508] In certain embodiments useful for inducing differentiation of mensenchymal or progenitor stem cells from the blood cell lineage, regenerating blood tissues, and protecting patients from blood cell degeneration-related disease, conditions, disorders or pathologies, PEP3 is selected from the group consisting of TPT, VPA, VPT, APT, APV, VPQ, VSO, SRV and TQV.

[0509] In certain embodiments useful for inducing differentiation of mensenchymal or progenitor stem cells from the blood cell lineage, regenerating blood tissues, and protecting patients from blood cell degeneration-related disease, conditions, disorders or pathologies, PEP5 is a peptide of general formula PEP3-AA¹¹-AA¹²; wherein PEP3 is selected from the group consisting of TPT, VPA, VPT, APT, APV, VPQ, VSO, SRV and TQV; wherein AA¹¹ is selected from the group consisting of E, K, Q, R, A, D, G and H, in particular is selected from the group consisting of K, R, A, D, H and Q; wherein AA¹² is selected from the group consisting of L, M, T, E, Q and H, in particular is selected from the group consisting of M, L, T and H. In one particular example, PEP5 is selected from the group consisting of TPTKM (SEQ ID NO: 6388), VPARL (SEQ ID NO: 6401), VPTRL (SEQ ID NO: 6427), APTKL (SEQ ID NO: 6369), APVKT (SEQ ID NO: 6379), VPQAL (SEQ ID NO: 6410), VSODL (SEQ ID NO: 6429), VPQDL (SEQ ID NO: 6411), SRVHH (SEQ ID NO: 6382) and TQVQL (SEQ ID NO: 6393).

[0510] In certain embodiments useful for inducing differentiation of mensenchymal or progenitor stem cells from the blood cell lineage, regenerating blood tissues, and protecting patients from blood cell degeneration-related disease, conditions, disorders or pathologies, PEP7 is an amino acid or a peptide with between two and seven amino acids of general formula AA¹-AA²-AA³-AA⁴-AA⁵-AA⁶-AA⁷ (SEQ ID NO: 6606); wherein AA¹, AA², AA³, AA⁴, and AA⁵ are independently absent or AA¹ as defined herein; wherein AA^{e} is absent or selected from the group consisting of S, T, C, E, Q, P and R, preferably is selected from the group consisting of S, C, Q and R; wherein AA⁷ is absent or is selected from the group consisting of S, T, C, E, Q, P and R, preferably is selected from the group consisting of C, S and P; and wherein at least one of AA¹, AA², AA³, AA⁴, AA⁵, AA⁶ or AA⁷ is not absent. In one particular example, PEP7 is selected from the group consisting of GSAGPXX (SEQ ID NO: 6441), AAPASXX (SEQ ID NO: 6436), STPPTXX (SEQ ID NO: 6452), HVPKPXX (SEQ ID NO: 6442), RVPSTXX (SEQ ID NO: 6449), ASAAPXX (SEQ ID NO: 6437), ASASPXX (SEQ ID NO: 6438), SSVKXQP (SEQ ID NO: 6451) and RNVQXRP (SEQ ID NO: 6448).

[0511] In certain embodiments useful for inducing differentiation of mensenchymal or progenitor stem cells from the blood cell lineage, regenerating blood tissues, and protecting patients from blood cell degeneration-related disease, conditions, disorders or pathologies, PEP9 is a peptide of general formula AA¹-AA²-AA³-AA⁴-AA⁵-AA⁶-AA⁷-PEP5; wherein PEP5 is a peptide of formula PEP3-AA¹¹-AA¹²; wherein PEP3 is selected from the group consisting of TPT, VPA, VPT, APT, APV, VPQ, VSO, SRV and TQV; wherein AA¹¹ is selected from the group consisting of E, K, Q, R, A, D, G and H, in particular is selected from the group consisting of K, R, A, D, H and Q; wherein AA¹² is selected from the group consisting of L, M, T, E, Q and H, in particular is selected from the group consisting of M, L, T and H; wherein AA¹, AA², AA³, AA⁴, and AA⁵ are independently absent or AA¹ as defined herein; wherein AA⁶ is absent or selected from the group consisting of S, T, C, E, Q, P and R, preferably is selected from the group consisting of S, C, Q and R; wherein AA⁷ is selected from the group consisting of S, T, C, E, Q, P and R, preferably is selected from the group consisting of C, S and P. In one particular example, PEP9 is selected from the group consisting of GSAGPXXTPTKM (SEQ ID NO: 6497), AAPASXXVPARL (SEQ ID NO: 6458), STPPTXXVPTRL (SEQ ID NO: 6573), HVPKPXXAPTKL (SEQ ID NO: 6503), RVPSTXXAPVKT (SEQ ID NO: 6550), ASAAPXXVPQAL (SEQ ID NO: 6468), ASASPXXVSQDL (SEQ ID NO: 6478), ASASPXXVPQDL (SEQ ID NO: 6476), SSVKXQPSRVHH (SEQ ID NO: 6565) and RNVQXRPTQVQL (SEQ ID NO: 6548).

[0512] In certain embodiments useful for inducing differentiation of mensenchymal or progenitor stem cells from the blood cell lineage, regenerating blood tissues, and protecting patients from blood cell degeneration-related disease, conditions, disorders or pathologies, PEP12 is a peptide of general formula PEP1-AA¹⁷-PEP11; wherein AA¹⁷ is selected from the group consisting of G, A, V, L, I, P, F, M, W, T and S (in particular is selected from the group consisting of M, I, V and T); wherein PEP1 is SNIT (SEQ ID NO: 6362).

[0513] In certain embodiments useful for inducing differentiation of mensenchymal or progenitor stem cells from the blood cell lineage, regenerating blood tissues, and protecting patients from blood cell degeneration-related disease, conditions, disorders or pathologies, PEP11 is a peptide with 3 amino acids of general formula AA¹⁸-AA¹⁹-AA²⁰; wherein AA¹⁸ is selected from the group consisting of L, V, Q, A and R, in particular is Q; wherein AA¹⁹ is selected from the group consisting of F, W, H, I and Y (in particular is 1); wherein AA²⁰ is selected from the group consisting of L, F, Y, K, I, V and M, in particular is M. In one particular example, PEP11 is QIM.

[0514] In certain embodiments useful for inducing differentiation of mensenchymal or progenitor stem cells from the blood cell lineage, regenerating blood tissues, and protecting patients from blood cell degeneration-related disease, conditions, disorders or pathologies, PEP1 is SNIT (SEQ ID NO: 6362) and PEP11 is QIM.

[0515] The definitions of “PEP” pairs and triplets e.g. PEP3:PEP1, PEP5:PEP12, or PEP7:PEP5:PEP1, also most particularly embodiments useful for inducing differentiation of mensenchymal or progenitor stem cells from the blood cell lineage, regenerating blood tissues, and protecting patients from blood cell degeneration-related disease, conditions, disorders or pathologies, are as already defined herein to the extent that PEP1, PEP3, PEP5, PEP7, PEP9, PEP11 and PEP12 are particularly useful for these applications as defined in the present blood section.

[0516] In certain embodiments useful for inducing differentiation of mensenchymal or progenitor stem cells from the blood cell lineage, regenerating blood tissues, and protecting patients from blood cell degeneration-related disease, conditions, disorders or pathologies, said GFR-binding compound is a synthetic molecule as defined herein in the definition section.

[0517] In certain embodiments useful for inducing differentiation of mensenchymal or progenitor stem cells from the blood cell lineage, regenerating blood tissues, and protecting patients from blood cell degeneration-related disease, conditions, disorders or pathologies, said GFR-binding compound is a synthetic peptide, or a variant or analog thereof, or a peptidomimetic.

[0518] Adipose Tissues

[0519] Certain embodiments of the invention are particularly useful for inducing differentiation of mensenchymal or progenitor stem cells from the adipocyte lineage, regenerating adipose tissues and protecting patients from adipose tissue degeneration-related diseases, conditions, disorders or pathologies.

[0520] In certain embodiments useful for inducing differentiation of mensenchymal or progenitor stem cells from the adipocyte lineage, regenerating adipose tissues and protecting patients from adipose tissue degeneration-related diseases, conditions, disorders or pathologies, PEP1 is SAIS (SEQ ID NO: 6360) or NAIS (SEQ ID NO: 6357).

[0521] In certain embodiments useful for inducing differentiation of mensenchymal or progenitor stem cells from the adipocyte lineage, regenerating adipose tissues and protecting patients from adipose tissue degeneration-related diseases, conditions, disorders or pathologies, PEP3 is selected from the group consisting of VPT, VPE, APT, TPT, VPA, APV, VPQ and VSO.

[0522] In certain embodiments useful for inducing differentiation of mensenchymal or progenitor stem cells from the adipocyte lineage, regenerating adipose tissues and protecting patients from adipose tissue degeneration-related diseases, conditions, disorders or pathologies, PEP5 is a peptide of general formula PEP3-AA¹¹-AA¹²; wherein PEP3 is selected from the group consisting of VPT, VPE, APT, TPT, VPA, APV, VPQ and VSO; wherein AA¹¹ is selected from the group consisting of E, K, Q, R, A, D, G and H, in particular is selected from the group consisting of E, K, Q, R, A and D; wherein AA¹² is selected from the group consisting of L, M, T, E, Q and H, in particular selected from the group consisting of L, M and T. In one particular example, PEP5 is selected from the group consisting of VPTEL (SEQ ID NO: 6421), VPEKM (SEQ ID NO: 6406), APTKL (SEQ ID NO: 6369), APTQL (SEQ ID NO: 6372), VPTKL (SEQ ID NO: 6423), TPTKM (SEQ ID NO: 6388), VPARL (SEQ ID NO: 6401), VPTRL (SEQ ID NO: 6427), APVKT (SEQ ID NO: 6379), VPQAL (SEQ ID NO: 6410), VSODL (SEQ ID NO: 6429) and VPQDL (SEQ ID NO: 6411).

[0523] In certain embodiments useful for inducing differentiation of mensenchymal or progenitor stem cells from the adipocyte lineage, regenerating adipose tissues and protecting patients from adipose tissue degeneration-related diseases, conditions, disorders or pathologies, PEP7 is an amino acid or a peptide with between two and seven amino acids of general formula AA¹-AA²-AA³-AA⁴-AA⁵-AA⁶-AA⁷ (SEQ ID NO: 6606); wherein AA¹, AA², AA³, AA⁴, and AA⁵ are independently absent or AA¹ as defined herein; wherein AA⁶ is absent or selected from the group consisting of S, T, C, E, Q, P and R, preferably is selected from the group consisting of C, S and T; wherein AA⁷ is absent or is selected from the group consisting of S, T, C, E, Q, P and R, preferably is C or S; and wherein at least one of AA¹, AA², AA³, AA⁴, AA⁵, AA⁶ or AA⁷ is not absent. In one particular example, PEP7 is selected from the group consisting of KIPKAXX (SEQ ID NO: 6445), GIPEPXX (SEQ ID NO: 6440), SIPKAXX (SEQ ID NO: 6450), HVTKPTX (SEQ ID NO: 6443), YVPKPXX (SEQ ID NO: 6454), TVPKPXX (SEQ ID NO: 6453), AVPKAXX (SEQ ID NO: 6439), KVGKAXX (SEQ ID NO: 6446), KASKAXX (SEQ ID NO: 6444), GSAGPXX (SEQ ID NO: 6441), AAPASXX (SEQ ID NO: 6436), STPPTXX (SEQ ID NO: 6452), HVPKPXX (SEQ ID NO: 6442), RVPSTXX (SEQ ID NO: 6449), ASAAPXX (SEQ ID NO: 6437) and ASASPXX (SEQ ID NO: 6438).

[0524] In certain embodiments useful for inducing differentiation of mensenchymal or progenitor stem cells from the adipocyte lineage, regenerating adipose tissues and protecting patients from adipose tissue degeneration-related diseases, conditions, disorders or pathologies, PEP9 is a peptide of general formula AA¹-AA²-AA³-AA⁴-AA⁵-AA⁶-AA⁷-PEP5; wherein PEP5 is a peptide of formula PEP3-AA¹¹-AA¹²; wherein PEP3 is selected from the group consisting of VPT, VPE, APT, TPT, VPA, APV, VPQ and VSO; wherein AA¹¹ is selected from the group consisting of E, K, Q, R, A, D, G and H, in particular E, K, Q, R, A and D; wherein AA¹² is selected from the group consisting of L, M, T, E, Q and H, in particular selected from the group consisting of L, M and T; wherein AA¹, AA², AA³, AA⁴, and AA⁵ are independently absent or AA¹ as defined herein; wherein AA^{e} is absent or selected from the group consisting of S, T, C, E, Q, P and R, preferably is selected from the group consisting of C, S and T; wherein AA⁷ is selected from the group consisting of S, T, C, E, Q, P and R, preferably is C or S. In one particular example, PEP9 is selected from the group consisting of KIPKAXXVPTEL (SEQ ID NO: 6535), GIPEPXXVPEKM (SEQ ID NO: 6491), SIPKAXXVPTEL (SEQ ID NO: 6563), HVTKPTXAPTKL (SEQ ID NO: 6511), YVPKPXXAPTKL (SEQ ID NO: 6583), TVPKPXXAPTQL (SEQ ID NO: 6575), AVPKAXXAPTKL (SEQ ID NO: 6479), KVGKAXXVPTKL (SEQ ID NO: 6543), KASKAXXVPTKL (SEQ ID NO: 6527), GSAGPXXTPTKM (SEQ ID NO: 6497), AAPASXXVPARL (SEQ ID NO: 6458), STPPTXXVPTRL (SEQ ID NO: 6573), HVPKPXXAPTKL (SEQ ID NO: 6503), RVPSTXXAPVKT (SEQ ID NO: 6550), ASAAPXXVPQAL (SEQ ID NO: 6468), ASASPXXVSQDL (SEQ ID NO: 6478) and ASASPXXVPQDL (SEQ ID NO: 6476).

[0525] In certain embodiments useful for inducing differentiation of mensenchymal or progenitor stem cells from the adipocyte lineage, regenerating adipose tissues and protecting patients from adipose tissue degeneration-related diseases, conditions, disorders or pathologies, PEP12 is a peptide of general formula PEP1-AA¹⁷-PEP11; wherein AA¹⁷ is selected from the group consisting of G, A, V, L, I, P, F, M, W, T and S (in particular is selected from the group consisting of M, V and T); wherein PEP1 is SAIS (SEQ ID NO: 6360) or NAIS (SEQ ID NO: 6357).

[0526] In certain embodiments useful for inducing differentiation of mensenchymal or progenitor stem cells from the adipocyte lineage, regenerating adipose tissues and protecting patients from adipose tissue degeneration-related diseases, conditions, disorders or pathologies, PEP11 is a peptide with 3 amino acids of general formula AA¹⁸-AA¹⁹-AA²⁰; wherein AA¹⁹ is selected from the group consisting of L, V, Q, A and R, in particular is L; wherein AA¹⁹ is selected from the group consisting of F, W, H and Y (in particular is a polar aromatic amino acid such as Y); wherein AA² is selected from the group consisting of L, F, Y, K, I, V and M, in particular is L or F. In one particular example, PEP11 is LYL or LYF.

[0527] In certain embodiments useful for inducing differentiation of mensenchymal or progenitor stem cells from the adipocyte lineage, regenerating adipose tissues and protecting patients from adipose tissue degeneration-related diseases, conditions, disorders or pathologies, PEP1 is SAIS (SEQ ID NO: 6360) or NAIS (SEQ ID NO: 6357); PEP11 is LYL or LYF; and the pair PEP1:PEP11 is SAIS (SEQ ID NO: 6360):LYL or NAIS (SEQ ID NO: 6357):LYF.

[0528] The definitions of “PEP” pairs and triplets e.g. PEP3:PEP1, PEP5:PEP12, or PEP7:PEP5:PEP1, also most particularly embodiments useful for inducing differentiation of mensenchymal or progenitor stem cells from the adipocyte lineage, regenerating adipose tissues and protecting patients from adipose tissue degeneration-related diseases, conditions, disorders or pathologies, are as already defined herein to the extent that PEP1, PEP3, PEP5, PEP7, PEP9, PEP11 and PEP12 are particularly useful for these applications as defined in the present adipose tissue section.

[0529] In certain embodiments useful for inducing differentiation of mensenchymal or progenitor stem cells from the adipocyte lineage, regenerating adipose tissues and protecting patients from adipose tissue degeneration-related diseases, conditions, disorders or pathologies, said GFR-binding compound is a synthetic molecule as defined herein in the definition section.

[0530] In certain embodiments useful for inducing differentiation of mensenchymal or progenitor stem cells from the adipocyte lineage, regenerating adipose tissues and protecting patients from adipose tissue degeneration-related diseases, conditions, disorders or pathologies, said GFR-binding compound is a synthetic peptide, or a variant or analog thereof, or a peptidomimetic.

[0531] Tissue Closure

[0532] In certain embodiments useful for promoting tissue closure, the choice of PEP1, PEP3, PEP5, PEP7, PEP9, PEP12, PEP11 and AA¹⁷ will depend on the type of specific tissue closure to be performed and may include any of the suitable amino acids, peptides, analog or variant thereof, or peptidomimetic, already disclosed herein with respect to the bone, cartilage, vascular, wound healing, neuronal, eye-retinal, kidneys, liver, L/T and skin applications. For instance, in certain embodiments, during bone repair surgery, different layers of tissue such as skin, muscle and blood vessel are incised in order to reach the damaged bone part. Thus, suitable PEP1, PEP3, PEP5, PEP7, PEP9, PEP12, PEP11 and AA¹⁷ for implementing embodiments of the invention in this specific situation may include such amino acids, peptides, analog or variant thereof, or peptidomimetic, already described herein with respect to skin, muscle, vascular and bone tissue regeneration/formation and cell migration. Likewise, for example, in certain embodiments, during heart surgery, different layers of tissue such as skin, muscle and blood vessel, are incised in order to reach the patient's heart. Thus, suitable PEP1, PEP3, PEP5, PEP7, PEP9, PEP12, PEP11 and AA¹⁷ for implementing embodiments of the invention in this specific situation include such amino acids, peptides, analog or variant thereof, or peptidomimetic, already described herein with respect to the skin, muscle and blood vessel tissue regeneration/formation and cell migration.

[0533] II. Bioactive Carriers

[0534] The present invention may achieve its intended therapeutic and/or cosmetic action(s) e.g. through efficient tissue induction, by functional combination (or association) with a bioactive carrier.

[0535] In one example, said GFR-binding compound and said bioactive carrier are thus operably associated, combined, linked or connected as defined herein and thus may form a pharmaceutical, dermatological, prophylactic, diagnostic, imaging or cosmetic association or combination for uses and methods as defined herein.

[0536] As may be used herein, the term “bioactive carrier”, “biocompatible carrier”, “bioactive material”, “biocompatible material”, “bioactive substance”, “bio-substance”, “biocompatible substance”, are used interchangeably.

[0537] A suitable bioactive carrier is compatible with living cells, tissues, organs or systems posing little to no risk of injury, toxicity or rejection by the immune system. Bioactive carriers suitable for implementing embodiments of the present invention include, but are not limited to, (a) a biopolymer such as (a1) collagen, (a2) fibrin; (b) a synthetic polymer such as (b1) ultra-high molecular weight polyethylene (UHMWPE), (b2) polyurethane (PE), (b3) polyurethane (PU), (b4) polytetrafuoroethylene (PTFE), (b5) polyacetal (PA), (b6) polymethylmethacrylate (PMMA), (b7) polyethylene terepthalate (PET), (b8) silicone rubber (SR), (b9) polyetheretherketone (PEEK), (b10) poly(lactic acid) (PLA), (b11) polysulfone (PS), (b12) PLLA, (b13) PLGA or (b14) PLDA; (c) metals and metal oxides such as (c1) gold and gold alloys, (c2) silver and silver alloys, (c3) platinum and platinum alloys, (c4) tantalum, (c5) Ti6Al4V, (c6) 316L stainless steel, (c7) Co—Cr Alloys, (c8) titanium alloys such as such as □-type, β-type, □+□-type Ti alloy, Ti—Nb alloys such as Ti29Nb13Ta4.6Zr or Ti35Nb4Sn); (d) metallic glasses; (e) amorphous alloys such as Zr-based alloys; (f) porous metals such as the ones reported in Ryan et al., 2006, Biomaterials, 27, 2651; Lopez-Heredia et al. 2008, Biomaterials, 29, 2608; Ryan et al., 2008, Biomaterials, 29, 3625; Li et al., 2007, Biomaterials, 28, 2810; or Hollander et al., 2006, Biomaterials, 27, 955; all being incorporated herein in their entirety; (g) gel or solid ceramics such as (g1) alumina, (g2) zirconia, (g3) carbon, (g4) titania, (g5) bioglass, or (g6) hydroxyapatite (HA); (h) composites such as (h1) silica/SR, (h2) CF/UHMWPE, (h3) CF/PTFE, (h4) HA/PE, (h5) CF/epoxy, (h6) CF/PEEK, (h7) CF/C or (h8) Al₂O₃/PTFE; (i) hydrogels such as (i1) polyisocyanopeptide hydrogels such as oligo(ethylene)glycol polyisocyanopeptides as described, for instance, in Van Buul, et al.; Chem. Sci. 4, 2357-2363 (2013), incorporated herein by reference in its entirety, (i2) polysaccharides such as alginates, chitosans, chitins, guar gums, pectins, gellan gums, heparins, carrageenans, hyaluronans, starches, agars, xanthan gums, methylcellulose, carboxymethylcellulose, hydroxypropyl methyl cellulose, (i3) polyglycols such as polyethyleneglycol or polypropyleneglycol, (i4) polyvinylpyrrolidone, (i5) poly(vinylalcohol), (i6) polyacrylic acids, (i7) glycerophosphates, (i8) 2-acrylamido-2-methylpropanesulfonic acid, (i9) polyphosphazenes; (j) other suitable materials such as demineralized bone matrix; and any combinations thereof.

[0538] Suitable sources of bioactive carriers for implementing embodiments of the present invention include, but are not limited to, autographs, allographs, xenographs, plants, solutions, excipients, ceramics, metals, metal alloys, organic and inorganic polymers, bioglasses, carbon-containing structures, or combination thereof.

[0539] Particularly suitable as bioactive carriers for implementing embodiments of the present invention include bioactive carriers comprising at least one naturally occurring hydroxyl group on at least one surface thereof and bioactive carriers which do not naturally comprise at least one hydroxyl group on a surface thereof but which have been modified using conventional surface treatment techniques such that at least one hydroxyl group is present on a surface of the bioactive carrier. In one example, said hydroxyl group is an available hydroxyl group i.e. it is not prevented from interacting and/or reacting with a compound of the present disclosure. Suitable as bioactive carriers naturally containing hydroxyl groups on a surface thereof for implementing embodiments of the invention specifically include metal oxides such as titanium oxides and non-metal oxides such ceramics. Also suitable as bioactive carriers for implementing embodiments of the invention include bioactive carriers comprising at least one naturally occurring carboxylate group (—COOH) or amine group (—NH₂) on at least one of a surface thereof and bioactive carriers which do not naturally comprise at least one carboxylate group (—COOH) or amine group (—NH₂) onto a surface thereof but which have been modified using conventional surface treatment techniques such that at least one carboxylate group (—COOH) or amine group (—NH₂) is present on a surface of the bioactive carrier.

[0540] In one example, said bioactive carrier includes a biomaterial. Suitable biomaterials for implementing certain embodiments of the present disclosure may be derived from nature or synthesized in the laboratory using a variety of chemical approaches utilizing metallic components, polymers, ceramics or composite materials. They are often used and/or adapted for a medical application, and thus comprise whole or part of a living structure or biomedical device. Suitable biomaterials for implementing certain embodiments of the present disclosure are commonly used in joint replacements, bone plates, bone cement, artificial ligaments and tendons, dental implants for tooth fixation, blood vessel prostheses, heart valves, skin repair devices (artificial tissue), cochlear replacements, contact lenses, breast implants, drug delivery mechanisms, sustainable materials, vascular grafts, stents, nerve conduits. Particularly suitable biomaterials for implementing certain embodiments of the present disclosure such as metals and alloys (pages 94-95), ceramics (pages 95-97), polymeric biomaterials (pages 97-98) and biocomposite materials (pages 98-99) are described in Nitesh et al., International Journal of Emerging Technology and Advanced Engineering, ISSN 2250-2459, Volume 2, Issue 4, 2012, which is herein incorporated by reference in its entirety.

[0541] In one particular example, said bioactive carrier is a biomaterial.

[0542] In certain embodiments, particularly suitable bioactive carriers are selected from the group consisting of bioinert biomaterials, bioactive biomaterials and bioresorbable biomaterials.

[0543] The nature of the biomaterial is an important parameter. Particularly good results have been obtained using bioactive carriers composed mostly with the main material component of the tissue to be regenerated and/or repaired. This generally allows for a better integration of the bioactive carrier, a better resorption from the surrounding cells already present and therefore a better regeneration or repair of the targeted tissue to be achieved. For example, it was discovered that particularly good results may be obtained when a solid ceramic component (granulated ceramic powder or ceramic scaffolds) or a gel ceramic component is used in combination of a GFR-binding peptide of the present disclosure to regenerate bone and protect from osteoporosis. For example, it was also discovered that particularly good results may be obtained when collagen, in particular collagen types I, II, III and XI, is used in combination of a GFR-binding peptide of the present disclosure to regenerate cartilage. For example, it was also discovered that particularly good results may be obtained when collagen, in particular collagen types I and III, or a biodegradable hydrogel is used in combination of a GFR-binding peptide of the present disclosure to regenerate muscle, skin, tendons and ligaments. For example, it was also discovered that particularly good results may be obtained when a collagen or a biodegradable hydrogel is used in combination of a GFR-binding peptide of the present disclosure to regenerate tissues and/or functions of vascular, neuron, eye retina, renal, wound healing, hair, fertility and reproduction, lung, and adipose tissues.

[0544] Bioinert biomaterials: As used herein, unless indicated otherwise or contradictory in context, the term “bioinert biomaterials” refers to any material that once placed in the human body has minimal interaction with its surrounding tissue. Examples of these are stainless steel, titanium, alumina, partially stabilised zirconia, and ultra-high molecular weight polyethylene. Generally a fibrous capsule might form around bioinert implants hence its biofunctionality relies on tissue integration through the implant.

[0545] Bioactive biomaterial: As used herein, unless indicated otherwise or contradictory in context, the term “bioactive biomaterial” refers to a material which, upon being placed within the human body, interacts with the surrounding bone and in some cases, even soft tissue. This occurs through a time-dependent kinetic modification of the surface, triggered by their implantation within the living bone. An ion-exchange reaction between the bioactive implant and surrounding body fluids, results in the formation of a biologically active carbonate apatite (CHAp) layer on the implant that is chemically and crystallographically equivalent to the mineral phase in bone. Examples of these materials are synthetic hydroxyapatite [Ca₁₀(PO₄)₆(OH)₂], glass ceramic A-W and bioglass®.

[0546] Bioresorbable Biomaterials: As used herein, unless indicated otherwise or contradictory in context, the term “bioresorbable biomaterials” refers to a material which, upon placement within the human body, starts to dissolve (resorbed) and slowly replaced by advancing tissue (such as bone). Examples of bioresorbable materials include, but are not limited to, tricalcium phosphate [Ca₃(PO₄)₂], polylactic-polyglycolic acid copolymers, calcium oxide, calcium carbonate and gypsum.

[0547] Therefore, no particular limitation should be ascribed to the substance, material or molecule suitable as being bioactive carriers for implementing embodiments of the present invention insofar as said substance, material or molecule is (a) biocompatible as defined herein and (b) combinable or associable with a GFR-binding compound as defined herein. In one preferred example, said bioactive carrier has a stiffness of at least 5 kPa, more preferably at least 35 kPa and preferably not more than 3 or 5 GPa as measured using conventional Dynamic Mechanical Analysis such as described in details in Gong JP et al., Double-network hydrogels with extremely high mechanical strength, Adv Mater 2003, 15(14), 1155e8, which is incorporated herein by reference.

[0548] In one particular example, a biomaterial as defined herein for use in neuron-related applications has a stiffness comprised between about 0.01 kPa and about 3 kPa, preferably between about 0.01 kPa and about 1 kPa. In one particular example, a biomaterial as defined herein for use in muscle, cartilage and tendon/ligament—related applications has a stiffness comprised between about 3 kPa and about 200 kPa, preferably between about 10 kPa and about 30 kPa. In one particular example, a biomaterial as defined herein for use in bone-related applications has a stiffness comprised between about 30 kPa and about 3 GPa, preferably between about 70 kPa and about 200 kPa for instance in applications such as the treatment or prevention of osteoporosis and bone tissue regeneration. In one particular example, a biomaterial as defined herein for use in hair-related applications has a stiffness comprised between about 0.01 kPa and about 200 kPa, preferably between about 3 kPa and about 70 kPa. In one particular example, a biomaterial as defined herein for use in endothelization-related applications has a stiffness comprised between about 500 kPa and about 2.5 GPa. In one particular example, a biomaterial as defined herein for use in angiogenesis-related applications has a stiffness comprised between about 0.01 kPa and about 100 kPa. In one particular example, a biomaterial as defined herein for use in wound healing and skin-related applications has a stiffness comprised between about 0.01 kPa and about 70 kPa.

[0549] Available hydroxyl groups: As used herein, unless indicated otherwise or contradictory in context, the term “free hydroxyl” or “available hydroxyl” means an hydroxyl group, which may be —OH or a radical (—O′) or an anion (—O′) fully or partially ionised, which is able to/free to act as a nucleophile in a reaction with an electrophile such as compound (A) or compound (B) defined below.

[0550] Available hydroxyl-containing surface: As used herein, unless indicated otherwise or contradictory in context, the term “available hydroxyl-containing surface” or “free hydroxyl-containing surface” means a surface containing at least one free or available hydroxyl group as defined herein.

[0551] Ceramics: As used herein, unless indicated otherwise or contradictory in context, the term “ceramic” refers to an inorganic material with a high melting point, above 1000° C. Most typically, materials referred to as “ceramics” are obtained by a process in which raw material solid particles are heated in order to sinter them. Materials referred to as “ceramics” may broadly be split into two groups, these being “oxide ceramics” and “non-oxide ceramics”. “Oxide ceramics” include, but are not limited to, akaline earth oxides such as MgO and BaO, Al₂O₃ and aluminates, TiO₂ and titanates, ZrO₂ and zirconates, silicates such as clays and clay-derived materials. Since the term “ceramics” may encompass crystalline, partially amorphous and fully amorphous materials, the term “oxide ceramics” may also be interpreted as covering fully amorphous silicate glasses. “Non-oxide ceramics” include, but are not limited to, carbides and nitrides, and also borides and silicides, for example silicon carbide and silicon nitride, and also metal carbides and nitrides. In one particular example, solid ceramics e.g. in granulated powder or as a scaffold, is used as a bioactive carrier in the meaning of the present disclosure in bone-related applications. In one particular example, gel ceramics is used as a bioactive carrier in the meaning of the present disclosure in bone-related applications.

[0552] Metal oxides: As used herein, unless indicated otherwise or contradictory in context, the term “metal oxide” means a chemical compound that contains at least one oxygen atom and one other element in its chemical formula. Metal oxides typically contain an anion of oxygen in the oxidation state of −2. They can be obtained by hydrolysis or air/oxygen oxidation. Examples of such metal oxides are titanium oxides (e.g. TIO, Ti₂O₃, TiO₂), silicon oxide (SiO₂), aluminum oxide (Al₂O₃), iron (II, III) oxides such as Fe₂O₃, and zinc oxide (ZnO).

[0553] Biopolymer: As used herein, unless indicated otherwise or contradictory in context, the term “biopolymer” refers to a polymer produced by living organisms and includes, but is not limited to, polypeptides and proteins (such as collagen and fibrin), polysaccharides (such as cellulose, starch, chitin and chitosan), nucleic acids (such as DNA and RNA), and hydrides thereof.

[0554] Hydrogel: As used herein, unless indicated otherwise or contradictory in context, the term “hydrogel” refers to “Hydrogel” refers to a class of polymeric materials which are swollen in an aqueous medium, but which do not dissolve in water. Hydrogels are highly absorbent (they can contain over 99% water) natural or synthetic polymers. Hydrogels also possess a degree of flexibility very similar to natural tissue, due to their significant water content. U.S. Pat. No. 6,475,516, for example, provides hydrogels being covalently bound to the surface of an in-dwelling medical device such as an implant, which may be functionalized with a GFR-binding compound of the present disclosure using, for instance, a process as described herein. In one particular example, biodegradable hydrogels are used as bioactive carriers in the meaning of the present disclosure.

[0555] Collagen: As used herein, unless indicated otherwise or contradictory in context, the term “collagen” refers to the main structural protein of the various connective tissues in animals which is mostly found in fibrous tissues such as tendons, ligaments and skin, and is also abundant in corneas, cartilage, bones, blood vessels, the gut, and intervertebral discs. Collagen is typically composed of a triple helix and generally contains high hydroxyproline content. The most common motifs in its amino acid sequence glycine-proline-X and glycine-X-hydroxyproline, where X is any amino acid other than glycine, proline or hydroxyproline. 28 types of collagen have been identified and described in the literature, which are all presently contemplated to be suitable for implementing embodiments of the invention. The five most common types are: Collagen I which may be found in skin, tendon, vascular ligature, organs, bone (main component of the organic part of bone); Collagen II which may be found in cartilage (main component of cartilage); Collagen III which may be found in reticulate (main component of reticular fibers); Collagen IV which may be found in the basal lamina, the epithelium-secreted layer of the basement membrane; Collagen V which may be found on cell surfaces, hair and placenta. For example, in certain embodiments, suitable collagens for implementing embodiments of the present invention particularly include collagen type-I and type-IV. In one particular example, collagen, in particular collagen types I, II, III and XI, is used as a bioactive carrier in the meaning of the present disclosure in cartilage-related applications. In one particular example, collagen, in particular collagen types I and III, is used as a bioactive carrier in the meaning of the present disclosure in muscle-related applications, skin-related applications, and T/L-related applications. In one particular example, any type of collagen is used as a bioactive carrier in the meaning of the present disclosure in vascular, neuron, eye retina, renal, wound healing, hair, fertility and reproduction, lung, adipose—related applications.

[0556] In certain embodiments, said association, combination, linkage or connection between said GFR-binding compound and a bioactive carrier may occur via a bioactive carrier-affinity-containing group as defined herein.

[0557] IV. Bioactive Carrier-Affinity-Containing Group

[0558] In one aspect, the present disclosure provides a GFR-binding compound as already defined herein modified or functionalised with at least one bioactive carrier-affinity-containing group. Said at least one bioactive carrier-affinity-containing group provides said GFR-binding compound with the ability to, covalently or non-covalently, interact with, or be connected to, a bioactive carrier as defined herein (in particular, a biomaterial as defined herein).

[0559] In such embodiments where affinity is required via covalent interaction or binding, said bioactive carrier-affinity-containing group may be a thiol (SH)-containing group or a cysteine-containing group, in particular, a thiol (SH)-containing peptide or a cysteine-containing peptide. In such embodiments where affinity is required via covalent interaction or binding, said bioactive carrier-affinity-containing group may particularly be a cysteine.

[0560] In such embodiments where affinity is required via non-covalent interaction or binding, said bioactive carrier-affinity-containing group may comprise (or be) a peptide group such as any one of the peptide groups disclosed in US patent application No. 2008/0268015 A1, which is hereby incorporated by reference in its entirety. In particular, peptides containing amino acid sequences rich in large aromatic amino acid residues (aromatic amino acid-containing peptides or peptidomimetics) that include one or more of Phe, Trp, Tyr such as sequences no: 1 to 45 described in US 2008/0268015 A1 are suitable as a biomaterial-affinity-containing fragment for implementing embodiments of the present invention. Said fragment may also be a peptide fragment such as any one of the peptide fragments disclosed in U.S. Pat. No. 6,818,620 B2, which is hereby incorporated by reference in its entirety. In particular, peptides of sequences no: 1 to 7 described in U.S. Pat. No. 6,818,620 B2 are suitable as a biomaterial-affinity-containing fragment for implementing embodiments of the present invention.

[0561] In one particular example, said bioactive carrier-affinity-containing group is a bioactive carrier high-affinity-containing group such as a biomaterial high-affinity-containing group.

[0562] In certain embodiments, said bioactive carrier-affinity-containing group has some affinity (preferably high affinity) with a given bioactive carrier (in particular, a biomaterial) such as collagen, apatite, titanium or any of those listed in e.g. US patent application No. 2008/0268015 A1, which is incorporated herein by reference. For instance, a group having some affinity with a biomaterial is any group capable to non-covalently interact/bind to a biomaterial with an affinity/specificity selected from at least 10%, at least 20%, at least 30%, at least 40%, at least 50%, at least 60%, at least 70%, at least 80%, at least 90%, at least 100%, at least 200%, at least 300%, at least 400%, at least 500%, or a higher percentage, with respect to an affinity where said group binds to an appropriate control such as, for example, a different material or surface, or a protein typically used for such comparisons such as bovine serum albumin. In one example, a biomaterial-affinity-containing group has a binding specificity that is characterized by a relative binding affinity as measured by an EC50 of 10 μM or less, and in certain embodiments, less than 1 μM. In certain embodiments, a relative affinity comprised between 1 μM and 100 μM, between 1 μM and 10 μM, or between 1 μM and 1 μM is particularly suitable. The EC50 is determined using any number of methods known in the art. In this case, the EC50 represents the concentration of fragment producing 50% of the maximal binding observed for that fragment in the assay.

[0563] In one particular example, said bioactive carrier-affinity-containing group is selected from the group consisting of GTPGP (SEQ ID NO: 6610), which may preferably non-covalently interact with a bioactive carrier such as an apatite, and WWFWG (SEQ ID NO: 6611), which may preferably non-covalently interact with a bioactive carrier such as a collagen.

[0564] In one particular example, said bioactive carrier-affinity-containing group is covalently or non-covalently (in particular, covalently) attached at an end (or extremity) of said GFR-binding compound.

[0565] V. Modified GFR-Binding Compound

[0566] Thus, in one aspect, the present disclosure provides a modified GFR-binding compound comprising a GFR-binding compound as defined in the present disclosure and a bioactive carrier-affinity-containing group; and wherein the RMSD of the GFR-binding compound is 2.45 Å or less.

[0567] For example, in certain embodiments, the present disclosure provides a modified GFR-binding compound comprising a GFR-binding compound as defined in the present disclosure and a bioactive carrier-affinity-containing group; wherein said bioactive carrier-affinity-containing group is selected from the group consisting of a thiol-containing group (in particular, a thiol-containing peptide), a cysteine-containing group (in particular, a cysteine-containing peptide and more particularly, a cysteine), and an aromatic amino acid-containing peptide or peptidomimetic; and wherein the RMSD of the GFR-binding compound is 2.45 Å or less.

[0568] For example, in certain embodiments, the present disclosure provides a modified GFR-binding compound comprising a GFR-binding compound and a bioactive carrier-affinity-containing group; wherein said GFR-binding compound is a peptide, a variant or analog thereof, or a peptidomimetic as defined herein, with (comprising, or exclusively consisting of, or constituted of) between 8-30 amino acids, in particular between 8-25 amino acids or between 8-22 amino acids, more particularly between 18-22 amino acids, even more particularly between 19-21 or 20, comprising a peptide with four amino acids (PEP1) selected from the group consisting of SAIS (SEQ ID NO: 6360), SSLS (SEQ ID NO: 6365), NAIS (SEQ ID NO: 6357), SATS (SEQ ID NO: 6361), SPIS (SEQ ID NO: 6364), EPIS (SEQ ID NO: 6353), SPIN (SEQ ID NO: 6363), KPLS (SEQ ID NO: 6356), EPLP (SEQ ID NO: 6354), EPLT (SEQ ID NO: 6355), SNIT (SEQ ID NO: 6362), RSVK (SEQ ID NO: 6359) and RPVQ (SEQ ID NO: 6358); wherein said bioactive carrier-affinity-containing group is selected from the group consisting of a thiol-containing group (in particular, a thiol-containing peptide), a cysteine-containing group (in particular, a cysteine-containing peptide and more particularly, a cysteine), and an aromatic amino acid-containing peptide or peptidomimetic; and wherein the RMSD of the GFR-binding compound is 2.45 Å or less.

[0569] For example, in certain embodiments, the present disclosure provides a modified GFR-binding compound comprising a GFR-binding compound and a bioactive carrier-affinity-containing group; wherein said GFR-binding compound is a peptide, a variant or analog thereof, or a peptidomimetic as defined herein, with (comprising, or exclusively consisting of, or constituted of) between 8-30 amino acids, in particular between 8-25 amino acids or between 8-22 amino acids, more particularly between 18-22 amino acids, even more particularly between 19-21 or 20, comprising a peptide with height amino acids of general formula (PEP12): PEP1-AA¹⁷-PEP11; wherein PEP1 is a peptide with four amino acids selected from the group consisting of SAIS (SEQ ID NO: 6360), SSLS (SEQ ID NO: 6365), NAIS (SEQ ID NO: 6357), SATS (SEQ ID NO: 6361), SPIS (SEQ ID NO: 6364), EPIS (SEQ ID NO: 6353), SPIN (SEQ ID NO: 6363), KPLS (SEQ ID NO: 6356), EPLP (SEQ ID NO: 6354), EPLT (SEQ ID NO: 6355), SNIT (SEQ ID NO: 6362), RSVK (SEQ ID NO: 6359) and RPVQ (SEQ ID NO: 6358); wherein PEP11 is a peptide with 3 amino acids of formula AA¹⁸-AA¹⁹-AA²⁰; wherein AA¹⁷ is selected from the group consisting of G, A, V, L, I, P, F, M, W, T and S (in particular is selected from the group consisting of M, I, L, V and T); wherein AA¹⁸ is selected from the group consisting of L, V, Q, A and R; wherein AA¹⁹ is selected from the group consisting of F, W, H and Y (in particular is an aromatic, polar amino acid such as Y); wherein AA²⁰ is selected from the group consisting of L, F, Y, K, I, V and M; wherein said bioactive carrier-affinity-containing group is selected from the group consisting of a thiol-containing group (in particular, a thiol-containing peptide), a cysteine-containing group (in particular, a cysteine-containing peptide and more particularly, a cysteine), and an aromatic amino acid-containing peptide or peptidomimetic; and wherein the RMSD of the GFR-binding compound is 2.45 Å or less.

[0570] For example, in certain embodiments, the present disclosure provides a modified GFR-binding compound comprising a GFR-binding compound and a bioactive carrier-affinity-containing group; wherein said GFR-binding compound is a peptide, a variant or analog thereof, or a peptidomimetic as defined herein, with (comprising, or exclusively consisting of, or constituted of) between 8 and 30 (in particular between 8-25 or between 8-22, more particularly between 18-22, even more particularly between 19-21 or 20) amino acids, having the following general formula (I) (hereinafter may also be referred to as compound (I) or peptide (I)):

PEP(C)−PEP12 (I)

[0571] wherein PEP12 is a peptide with 8 amino acids of formula PEP1-AA¹⁷-PEP11 as defined herein; wherein one end of PEP(C) interacts covalently with PEP12 via one end of PEP1; wherein PEP(C) is a peptide with at least 5 amino acids, in particular a peptide with between 5 and 12 amino acids; wherein said bioactive carrier-affinity-containing group is selected from the group consisting of a thiol-containing group (in particular, a thiol-containing peptide), a cysteine-containing group (in particular, a cysteine-containing peptide and more particularly, a cysteine), and an aromatic amino acid-containing peptide or peptidomimetic; and wherein the RMSD of the GFR-binding compound is 2.45 Å or less.

[0572] For example, in certain embodiments, the present disclosure provides a modified GFR-binding compound comprising a GFR-binding compound and a bioactive carrier-affinity-containing group; wherein said GFR-binding compound is a peptide, a variant or analog thereof, or a peptidomimetic as defined herein, with (comprising, or exclusively consisting of, or constituted of) between 8 and 30 (in particular between 8-25 or between 8-22, more particularly between 18-22, even more particularly between 19-21 or 20) amino acids, having the following general formula (II) (hereinafter may also be referred to as compound (II) or peptide (II)):

PEP7−PEP5−PEP12 (II)

wherein PEP12 is a peptide with 8 amino acids of formula PEP1-AA¹⁷-PEP11 as defined herein; wherein PEP5 is a peptide with five amino acids as defined herein; wherein PEP7 is an amino acid or a peptide with between two and seven amino acids as defined herein; wherein one end of PEP5 interacts covalently with one end of PEP12 via one end of PEP1; wherein another end of PEP5 interacts covalently with one end of PEP7 via AA⁷; wherein said bioactive carrier-affinity-containing group is selected from the group consisting of a thiol-containing group (in particular, a thiol-containing peptide), a cysteine-containing group (in particular, a cysteine-containing peptide and more particularly, a cysteine), and an aromatic amino acid-containing peptide or peptidomimetic; and wherein the RMSD of the GFR-binding compound is 2.45 Å or less.

[0573] For example, in certain embodiments, the present disclosure provides a modified GFR-binding compound comprising a GFR-binding compound and a bioactive carrier-affinity-containing group; wherein said GFR-binding compound is a peptide, a variant or analog thereof, or a peptidomimetic as defined herein, with (comprising, or exclusively consisting of, or constituted of) between 8 and 30 (in particular between 8-25 or between 8-22, more particularly between 18-22, even more particularly between 19-21 or 20) amino acids, having the following general formula (III) (hereinafter may also be referred to as compound (III) or peptide (III)):

AA¹-AA²-AA³-AA⁴-AA⁵-AA⁶-AA⁷-AA-AA⁹-AA¹⁰-AA¹¹-AA¹²-AA¹³-AA¹⁴-AA¹⁵-AA¹⁶-AA¹⁷-AA¹⁸-AA¹⁹-AA²⁰ (III)

wherein AA¹-AA²-AA³-AA⁴-AA⁵-AA⁶-AA⁷ (SEQ ID NO: 6606) is PEP7 as defined herein; wherein AA¹³-AA¹⁴-AA¹⁵-AA¹⁶-AA¹⁷-AA¹⁸-AA¹⁹-AA²⁰ is PEP12 as defined herein; wherein AA⁸-AA⁹-AA¹⁰ is PEP3 as defined herein; wherein AA¹¹ and AA¹² are as defined herein; wherein AA¹ may be an N-terminal amino acid or a C-terminal amino acid; wherein AA²⁰ may be an N-terminal amino acid or a C-terminal amino acid; wherein said bioactive carrier-affinity-containing group is selected from the group consisting of a thiol-containing group (in particular, a thiol-containing peptide), a cysteine-containing group (in particular, a cysteine-containing peptide and more particularly, a cysteine), and an aromatic amino acid-containing peptide or peptidomimetic; and wherein the RMSD of the GFR-binding compound is 2.45 Å or less.

[0574] VI. Functionalised Bioactive Carriers

[0575] In one aspect, the present disclosure provides a functionalised bioactive carrier, which may be used for inducing, in-vitro, ex-vivo or in-vivo, tissue regeneration, comprising at least one GFR-binding compound (in particular, at least one modified GFR-binding compound) as defined in the present disclosure. In one example, said (modified) GFR-binding compound and bioactive carrier are both active principles/ingredients. In certain embodiments, said functionalised bioactive carrier is a modified, functionalised, coated or grafted biomaterial as defined herein, in particular, a modified, functionalised, coated or grafted tissue regeneration compatible-biomaterial.

[0576] In one example, said functionalised bioactive carrier comprises one (modified) GFR-binding compound. In one example, said functionalised bioactive carrier comprises two or more distinct (modified) GFR-binding compounds. In one example, said functionalised bioactive carrier comprises three or more distinct (modified) GFR-binding compounds. In one example, said functionalised bioactive carrier comprises four or more distinct (modified) GFR-binding compounds.

[0577] Active or bioactive principles or Ingredients: In the present description and unless otherwise indicated or contradictory in context, the term “(bio)active principle” or “(bio)active ingredient” generally refers to a molecule, compound or substance which is responsible for providing the desired biological effect. Without said active ingredient, the formulation or composition containing it, would not provide the desired biological effect. For example, in certain embodiments, formulation excipients are not considered as active ingredients in the pharmaceutical composition as defined herein.

[0578] In one example, said functionalised bioactive carrier is formed using a method comprising, or exclusively consisting of, contacting a bioactive carrier as defined herein and a (modified) GFR-binding compound under reacting conditions thereby functionalizing at least one part (or at least one part of a surface) of said bioactive carrier and thus forming a functional association, interaction or bond between said bioactive carrier and said (modified) GFR-binding compound.

[0579] In the present description and unless otherwise indicated or contradictory in context, the terms “functionally associated”, “functionally combined”, “functionalized”, “Immobilized”, “deposited”, “coated”, or “grafted” all refer to the action of associating or functionalising at least one part of a bioactive carrier with a (modified) GFR-binding compound so that the desired biological, therapeutic and/or cosmetic effect e.g. inducing tissue formation, is obtained. The association or combination may be covalent and form, between said (modified) GFR-binding compound and said bioactive carrier, a covalent interaction as already defined herein, or, the association or combination may be non-covalent and form, between said (modified) GFR-binding compound and said bioactive carrier, a non-covalent interaction as already defined herein.

[0580] For example, in certain embodiments, a (modified) GFR-binding compound interacts covalently (makes at least one functional covalent interaction) with said bioactive carrier.

[0581] In one aspect, the present disclosure provides a functionalised bioactive carrier comprising a (modified) GFR-binding compound, wherein said (modified) GFR-binding compound (before any modifications) is a peptide, a variant or analog thereof, or a peptidomimetic as defined herein, having growth factor receptor-binding capability or capabilities, having a molecular weight of between 600-4,000 Da, 600-3,000 Da, or 800-4,000 Da, in particular between 800 and 3,000 Da; and wherein the RMSD is 2.45 Å or less.

[0582] In one aspect, the present disclosure provides a functionalised bioactive carrier comprising a (modified) GFR-binding compound, wherein said (modified) GFR-binding compound (before any modifications) is a peptide, a variant or analog thereof, or a peptidomimetic as defined herein, having growth factor receptor-binding capability or capabilities, with (comprising, or exclusively consisting of, or constituted of) between 8 and 30 (in particular between 8-25 or between 8-22, more particularly between 18-22, even more particularly between 19-21 or 20) amino acids, comprising a peptide with four amino acids (PEP1); and wherein the RMSD is 2.45 Å or less.

[0583] In one aspect, the present disclosure provides a functionalised bioactive carrier comprising a (modified) GFR-binding compound, wherein said (modified) GFR-binding compound (before any modifications) is a peptide, a variant or analog thereof, or a peptidomimetic as defined herein, with (comprising, or exclusively consisting of, or constituted of) between 8 and 30 (in particular between 8-25 or between 8-22, more particularly between 18-22, even more particularly between 19-21 or 20) amino acids, comprising a peptide with eight amino acids (PEP12); and wherein the RMSD is 2.45 Å or less.

[0584] In one aspect, the present disclosure provides a functionalised bioactive carrier comprising a (modified) GFR-binding compound, wherein said (modified) GFR-binding compound (before any modifications) is a peptide, a variant or analog thereof, or a peptidomimetic as defined herein, with (comprising, or exclusively consisting of, or constituted of) between 8 and 30 (in particular between 8-25 or between 8-22, more particularly between 18-22, even more particularly between 19-21 or 20) amino acids, comprising a peptide with four amino acids (PEP1); wherein said GFR-binding compound further comprises a peptide with three amino acids (PEP3); and wherein the RMSD is 2.45 Å or less.

[0585] In one aspect, the present disclosure provides a functionalised bioactive carrier comprising a (modified) GFR-binding compound, wherein said (modified) GFR-binding compound (before any modifications) is a peptide, a variant or analog thereof, or a peptidomimetic as defined herein, with (comprising, or exclusively consisting of, or constituted of) between 8 and 30 (in particular between 8-25 or between 8-22, more particularly between 18-22, even more particularly between 19-21 or 20) amino acids, comprising a peptide with eight amino acids (PEP12); wherein said GFR-binding compound further comprises a peptide with three amino acids (PEP3); and wherein the RMSD is 2.45 Å or less.

[0586] In one aspect, the present disclosure provides a functionalised bioactive carrier comprising a (modified) GFR-binding compound, wherein said (modified) GFR-binding compound (before any modifications) is a peptide, a variant or analog thereof, or a peptidomimetic as defined herein, with (comprising, or exclusively consisting of, or constituted of) between 8 and 30 (in particular between 8-25 or between 8-22, more particularly between 18-22, even more particularly between 19-21 or 20) amino acids, comprising a peptide with four amino acids (PEP1); wherein said GFR-binding compound further comprises a peptide with five amino acids (PEP5); and wherein the RMSD is 2.45 Å or less.

[0587] In one aspect, the present disclosure provides a functionalised bioactive carrier comprising a (modified) GFR-binding compound, wherein said (modified) GFR-binding compound (before any modifications) is a peptide, a variant or analog thereof, or a peptidomimetic as defined herein, with (comprising, or exclusively consisting of, or constituted of) between 8 and 30 (in particular between 8-25 or between 8-22, more particularly between 18-22, even more particularly between 19-21 or 20) amino acids, comprising a peptide with eight amino acids (PEP12); wherein said GFR-binding compound further comprises a peptide with five amino acids (PEP5); and wherein the RMSD is 2.45 Å or less.

[0588] In one aspect, the present disclosure provides a functionalised bioactive carrier comprising a (modified) GFR-binding compound, wherein said (modified) GFR-binding compound (before any modifications) is a peptide, a variant or analog thereof, or a peptidomimetic as defined herein, with (comprising, or exclusively consisting of, or constituted of) between 8 and 30 (in particular between 8-25 or between 8-22, more particularly between 18-22, even more particularly between 19-21 or 20) amino acids, comprising a peptide with four amino acids (PEP1); wherein said GFR-binding compound further comprises a peptide with between six and twelve amino acids (PEP9); and wherein the RMSD is 2.45 Å or less.

[0589] In one aspect, the present disclosure provides a functionalised bioactive carrier comprising a (modified) GFR-binding compound, wherein said (modified) GFR-binding compound (before any modifications) is a peptide, a variant or analog thereof, or a peptidomimetic as defined herein, with (comprising, or exclusively consisting of, or constituted of) between 8 and 30 (in particular between 8-25 or between 8-22, more particularly between 18-22, even more particularly between 19-21 or 20) amino acids, comprising a peptide with eight amino acids (PEP12); wherein said GFR-binding compound further comprises a peptide with between six and twelve amino acids (PEP9); and wherein the RMSD is 2.45 Å or less.

[0590] In one aspect, the present disclosure provides a functionalised bioactive carrier comprising a (modified) GFR-binding compound, wherein said (modified) GFR-binding compound (before any modifications) is a peptide, a variant or analog thereof, or a peptidomimetic as defined herein, with (comprising, or exclusively consisting of, or constituted of) between 8 and 30 (in particular between 8-25 or between 8-22, more particularly between 18-22, even more particularly between 19-21 or 20) amino acids, comprising a peptide with four amino acids (PEP1); wherein said GFR-binding compound further comprises a peptide with three amino acids (PEP3), an amino acid or a peptide with between two and seven amino acids (PEP7); and wherein the RMSD is 2.45 Å or less.

[0591] In one aspect, the present disclosure provides a functionalised bioactive carrier comprising a (modified) GFR-binding compound, wherein said (modified) GFR-binding compound (before any modifications) is a peptide, a variant or analog thereof, or a peptidomimetic as defined herein, with (comprising, or exclusively consisting of, or constituted of) between 8 and 30 (in particular between 8-25 or between 8-22, more particularly between 18-22, even more particularly between 19-21 or 20) amino acids, comprising a peptide with four amino acids (PEP12); wherein said GFR-binding compound further comprises a peptide with three amino acids (PEP3), an amino acid or a peptide with between two and seven amino acids (PEP7); and wherein the RMSD is 2.45 Å or less.

[0592] In one aspect, the present disclosure provides a functionalised bioactive carrier comprising a (modified) GFR-binding compound, wherein said (modified) GFR-binding compound (before any modifications) is a peptide, a variant or analog thereof, or a peptidomimetic as defined herein, with (comprising, or exclusively consisting of, or constituted of) between 8 and 30 (in particular between 8-25 or between 8-22, more particularly between 18-22, even more particularly between 19-21 or 20) amino acids, comprising a peptide with four amino acids (PEP1); wherein said GFR-binding compound further comprises a peptide with five amino acids (PEP5), an amino acid or a peptide with between two and seven amino acids (PEP7); and wherein the RMSD is 2.45 Å or less.

[0593] In one aspect, the present disclosure provides a functionalised bioactive carrier comprising a (modified) GFR-binding compound, wherein said (modified) GFR-binding compound (before any modifications) is a peptide, a variant or analog thereof, or a peptidomimetic as defined herein, with (comprising, or exclusively consisting of, or constituted of) between 8 and 30 (in particular between 8-25 or between 8-22, more particularly between 18-22, even more particularly between 19-21 or 20) amino acids, comprising a peptide with four amino acids (PEP12); wherein said GFR-binding compound further comprises a peptide with five amino acids (PEP5), an amino acid or a peptide with between two and seven amino acids (PEP7); and wherein the RMSD is 2.45 Å or less.

[0594] In one aspect, the present disclosure provides a functionalised bioactive carrier comprising a (modified) GFR-binding compound, wherein said (modified) GFR-binding compound (before any modifications) is a peptide, a variant or analog thereof, or a peptidomimetic as defined herein, with (comprising, or exclusively consisting of, or constituted of) between 8 and 30 (in particular between 8-25 or between 8-22, more particularly between 18-22, even more particularly between 19-21 or 20) amino acids, having the following general formula (I) (hereinafter may also be referred to as compound (I) or peptide (I)):

PEP(C)−PEP12 (I)

[0595] wherein PEP12 is a peptide with 8 amino acids of formula PEP1-AA¹⁷-PEP11 as defined herein; wherein one end of PEP(C) interacts covalently with PEP12 via one end of PEP1; wherein PEP(C) is a peptide with at least 5 amino acids, in particular a peptide with between 5 and 12 amino acids; and wherein the RMSD is 2.45 Å or less.

[0596] In one aspect, the present disclosure provides a functionalised bioactive carrier comprising a (modified) GFR-binding compound of general formula (I), wherein PEP(C) comprises PEP3; and wherein the RMSD is 2.45 Å or less.

[0597] In one aspect, the present disclosure provides a functionalised bioactive carrier comprising a (modified) GFR-binding compound of general formula (I), wherein PEP(C) comprises PEP5; and wherein the RMSD is 2.45 Å or less. In one particular example, PEP(C) is PEP5.

[0598] In one aspect, the present disclosure provides a functionalised bioactive carrier comprising a (modified) GFR-binding compound of general formula (I), wherein PEP(C) comprises PEP9; and wherein the RMSD is 2.45 Å or less. In one particular example, PEP(C) is PEP9.

[0599] In one aspect, the present disclosure provides a functionalised bioactive carrier comprising a (modified) GFR-binding compound of general formula (I), wherein PEP(C) comprises PEP3 and PEP7; and wherein the RMSD is 2.45 Å or less.

[0600] In one aspect, the present disclosure provides a functionalised bioactive carrier comprising a (modified) GFR-binding compound of general formula (I), wherein PEP(C) comprises PEP5 and PEP7; and wherein the RMSD is 2.45 Å or less.

[0601] In one aspect, the present disclosure provides a functionalised bioactive carrier comprising a (modified) GFR-binding compound, wherein said GFR-binding compound (before any modifications) is a peptide, a variant or analog thereof, or a peptidomimetic as defined herein, with (comprising, or exclusively consisting of, or constituted of) between 8 and 30 (in particular between 8-25 or between 8-22, more particularly between 18-22, even more particularly between 19-21 or 20) amino acids, having the following general formula (II) (hereinafter may also be referred to as compound (II) or peptide (II)):

PEP7−PEP5−PEP12 (II)

[0602] wherein PEP12 is a peptide with 8 amino acids of formula PEP1-AA¹⁷-PEP11 as defined herein; wherein PEP5 is a peptide with five amino acids as defined herein; wherein PEP7 is an amino acid or a peptide with between two and seven amino acids as defined herein; wherein one end of PEP5 interacts covalently with one end of PEP12 via one end of PEP1; wherein another end of PEP5 interacts covalently with one end of PEP7 via AA⁷; and wherein the RMSD is 2.45 Å or less.

[0603] In one particular aspect, the present disclosure provides a functionalised biomaterial comprising a (modified) GFR-binding compound; wherein said biomaterial is as defined herein; wherein said (modified) GFR-binding compound (before any modifications) is a peptide, a variant or analog thereof, with between 18-22 amino acids comprising a peptide PEP1 or a peptide PEP12, and a peptide PEP3 or a peptide PEP5; wherein said (modified) GFR-binding compound optionally further comprises a peptide PEP7; and wherein the RMSD is 2.45 Å or less.

[0604] In one particular aspect, the present disclosure provides a functionalised biomaterial comprising a (modified) GFR-binding compound; wherein said biomaterial is as defined herein; wherein said (modified) GFR-binding compound (before any modifications) is a peptidomimetic comprising between 18-22 amino acids comprising a peptide PEP1 or a peptide PEP12, and a peptide PEP3 or a peptide PEP5; wherein said (modified) GFR-binding compound optionally further comprises a peptide PEP7; and wherein the RMSD is 2.45 Å or less.

[0605] In one particular aspect, the present disclosure provides a functionalised biomaterial comprising a (modified) GFR-binding compound; wherein said biomaterial is as defined herein; wherein said (modified) GFR-binding compound (before any modifications) is a peptide, a variant or analog thereof, with between 19-21 amino acids comprising a peptide PEP1 or a peptide PEP12, and a peptide PEP3 or a peptide PEP5; wherein said (modified) GFR-binding compound optionally further comprises a peptide PEP7; and wherein the RMSD is 2.45 Å or less.

[0606] In one particular aspect, the present disclosure provides a functionalised biomaterial comprising a (modified) GFR-binding compound; wherein said biomaterial is as defined herein; wherein said (modified) GFR-binding compound (before any modifications) is a peptidomimetic comprising between 19-21 amino acids comprising a peptide PEP1 or a peptide PEP12, and a peptide PEP3 or a peptide PEP5; wherein said (modified) GFR-binding compound optionally further comprises a peptide PEP7; and wherein the RMSD is 2.45 Å or less.

[0607] In one particular aspect, the present disclosure provides a functionalised biomaterial comprising a (modified) GFR-binding compound; wherein said biomaterial is as defined herein; wherein said (modified) GFR-binding compound (before any modifications) is a peptide, a variant or analog thereof, with 21 amino acids comprising a peptide PEP1 or a peptide PEP12, and a peptide PEP3 or a peptide PEP5; wherein said (modified) GFR-binding compound optionally further comprises a peptide PEP7; and wherein the RMSD is 2.45 Å or less.

[0608] In one particular aspect, the present disclosure provides a functionalised biomaterial comprising a (modified) GFR-binding compound; wherein said biomaterial is as defined herein; wherein said (modified) GFR-binding compound (before any modifications) is a peptidomimetic comprising 21 amino acids comprising a peptide PEP1 or a peptide PEP12, and a peptide PEP3 or a peptide PEP5; wherein said (modified) GFR-binding compound optionally further comprises a peptide PEP7; and wherein the RMSD is 2.45 Å or less.

[0609] In one particular aspect, the present disclosure provides a functionalised biomaterial comprising a (modified) GFR-binding compound; wherein said biomaterial is as defined herein; wherein said (modified) GFR-binding compound (before any modifications) is a peptide, a variant or analog thereof, with 20 amino acids comprising a peptide PEP1 or a peptide PEP12, and a peptide PEP3 or a peptide PEP5; wherein said (modified) GFR-binding compound optionally further comprises a peptide PEP7; and wherein the RMSD is 2.45 Å or less.

[0610] In one particular aspect, the present disclosure provides a functionalised biomaterial comprising a (modified) GFR-binding compound; wherein said biomaterial is as defined herein; wherein said (modified) GFR-binding compound (before any modifications) is a peptidomimetic comprising 20 amino acids comprising a peptide PEP1 or a peptide PEP12, and a peptide PEP3 or a peptide PEP5; wherein said (modified) GFR-binding compound optionally further comprises a peptide PEP7; and wherein the RMSD is 2.45 Å or less.

[0611] In one aspect, the present disclosure provides a functionalised bioactive carrier comprising a (modified) GFR-binding compound, wherein said GFR-binding compounds may be any one of or a plurality of peptides of SEQ ID NO: 1 to 1085 and 1143 to 6352.

[0612] The present disclosure provides a functionalised bioactive carrier comprising a (modified) GFR-binding compound, wherein all of PEP1, PEP3, PEP5, PEP9, PEP11, PEP12 and AA¹⁷, pairs and triplets thereof, disclaimers and provisos, are as already defined herein.

[0613] Suitable covalent association or functionalization techniques for implementing embodiments of the present invention include, but are not limited to, reductive amination coupling or photo-grafting such as described in H. Freichel et al., Macromol. Rapid Commun. 2011, 32, 616-621 and V. Pourcelle et al., Biomacromol. 2009, 10, 966-974, the content of which is hereby incorporated by reference in its entirety.

[0614] In one aspect, the present disclosure provides a production method or process useful for producing a functionalised bioactive carrier according to the present disclosure wherein said bioactive carrier is a biomaterial such as a ceramic or a titanium, comprising, or exclusively consisting of, the contacting of a compound of formula (C—I) and a bioactive carrier as defined herein under suitable covalent-bond formation conditions thereby forming at least one covalent bond between said compound (C—I) and said bioactive carrier thus forming a functionalised bioactive carrier according to the present disclosure:

[chemical structure]

[0615] wherein X is Si; wherein Y is a divalent organic linker; wherein A is a (modified) GFR-binding compound according to the present disclosure, wherein R¹ and R² are both independently an organic spacing-compound other than a leaving group as defined herein, and wherein R³ is a leaving group as defined herein;

[0616] In one particular example, a process or method which may be used to functionally associate or combine a (modified) GFR-binding compound with a bioactive carrier such as a ceramic or a titanium is shown in Scheme 1:

[chemical structure]

[0617] Such syntheses involve the formation of a covalent interaction (or association) between a (modified) GFR-binding compound (represented as (A)-SH in Scheme 1) and a bioactive carrier as defined herein.

[0618] In one particular example, a process or method which may be used to functionally associate or combine a (modified) GFR-binding compound with a bioactive carrier is a method for covalent functionalization or depositing of a (modified) GFR-binding compound onto a polyetheretherketone polymer (PEEK) surface wherein (i) the polymer is treated with ethylene diamine (NH₂═NH₂) to create NH₂ functions on a PEEK surface from ketone (═O) functions and (ii) the hereby modified PEEK-NH₂ polymer is immersed in a solution of a chosen hetero-bifunctional cross-linker such as 3-succinimidyl-3-maleimidopropionate thereby reacting the maleimide group with a (modified) GFR-binding compound through e.g. a thiol group thereof.

[0619] In one particular example, a process or method which may be used to functionally associate or combine a (modified) GFR-binding compound with a bioactive carrier is a method for covalent functionalization or depositing of a (modified) GFR-binding compound onto a polylactic acid (PLLA) polymer wherein (i) the polymer is immersed in a solution containing, for instance, (dimethylaminopropyl)-3-ethylcarbodiimide hydrochloride+N-hydroxysuccinimide in (2-(N-morpholino)-ethanesulfonic acid and then (ii) rinsed using e.g. MilliQ water.

[0620] Leaving groups: As used herein, unless indicated otherwise or contradictory in context, the term “leaving group” means a molecular fragment which possesses the ability to depart with a pair of electrons in a heterolytic bond cleavage. Leaving groups are anions or neutral molecules and possess the ability to stabilize the additional electron density that results from bond heterolysis. Common anionic leaving groups are halogen atoms such as chlorine (Cl), bromine (Br), and iodine (I), which leaves as a chloride ion (Cl⁻), a bromide ion (Br) and an iodide ion (I⁻), respectively. Other leaving groups include sulfonate esters, such as tosylate (TsO⁻). Conventional neutral molecule leaving groups are water and ammonia. Suitable as leaving groups for implementing embodiments of the invention preferably include the group consisting of a halogen, a substituted or unsubstituted alkoxy group (—OR), a substituted or unsubstituted aryloxy or heteroaryloxy group (—OAr), a substituted or unsubstituted alkylcarbonyloxy group (—O₂CR), a substituted or unsubstituted arykcarbonyloxy or heteroarykcarbonyloxy group (—O₂CAr), a substituted or unsubstituted alkylsulfonyloxy group (—O₃SR), a substituted or unsubstituted arylsulfonyloxy or heteroarylsulfonyloxy group (—O₃SAr). Substituents of leaving groups include halogens, alkyl (preferably C1 to C5-alkyl) groups and alkoxy (preferably C1 to C5-alkoxy) groups.

[0621] Y Group

[0622] In the present disclosure, the Y group is not aimed at being particularly limited and any moiety comprising at least one atom and having the ability to covalently or non-covalently, preferably covalently, link or interact with the X and A groups as defined herein thereby providing a stable connection between an active substance A and the X group as defined herein, is, unless contradictory or non-adapted in context, suitable for implementing embodiments of the present disclosure and is comprised within the scope of the invention.

[0623] Thus, in the present description and unless otherwise indicated, the term “linker”, when used in relation to a Y group, means any organic moiety comprising at least one atom and having the ability to interact covalently or non-covalently with an active substance A and covalently interact with an X group as defined herein.

[0624] In one example, Y groups include divalent organic radicals selected from the group consisting of a saturated or unsaturated, preferably saturated, hydrocarbon chain comprising between 1 and 30 carbon atoms, wherein said hydrocarbon chain is optionally interrupted by one or more non-carbon atom, preferably between 1 and 16, between 1 and 12 or between 1 and 8 non-carbon atoms as appropriate, wherein said non-carbon atom is selected, for instance, from the group consisting of —O—, —S—, —C(═O), —SO₂—, —N(Ri)(C═O)—, —N(Ri)—, and the following radical:

[chemical structure]

wherein Ri is selected from the group consisting of a hydrogen atom, a C1-C6 alkyl group and a aryl group, and wherein said hydrocarbon chain is non-substituted or substituted, by at least one radical selected from the group consisting of a halogen, a hydroxyl group, a C1-C20 alkyl group and a aryl group.

[0625] Suitable as Y groups for implementing embodiments of the invention include saturated or unsaturated hydrocarbon chains comprising between 1 and 20 carbon atoms, saturated or unsaturated hydrocarbon chains comprising between 1 and 10 carbon atoms, saturated or unsaturated hydrocarbon chains comprising between 1 and 5 carbon atoms, saturated or unsaturated hydrocarbon chains comprising 1, 2 or 3 carbon atoms, all of which being specifically and individually preferred.

[0626] Also suitable as Y groups for implementing embodiments of the invention include saturated or unsaturated hydrocarbon chains comprising between 1 and 20 carbon atoms, saturated or unsaturated hydrocarbon chains comprising between 1 and 10 carbon atoms, saturated or unsaturated hydrocarbon chains comprising between 1 and 5 carbon atoms, saturated or unsaturated hydrocarbon chains comprising 1, 2 or 3 carbon atoms, and in which said hydrocarbon chain is optionally interrupted by one or more, preferably between 1 and 16, between 1 and 12 or between 1 and 8, non-carbon atom, selected from the group consisting of an oxygen atom, a nitrogen atom, a carbonyl group and/or the following radical:

[chemical structure]

all of which being specifically preferred and individually contemplated.

[0627] Also suitable as Y groups for implementing embodiments of the invention is:

[chemical structure]

[0628] wherein n is comprised betwwen 1 and 29, in particular between 1 and 5; and wherein m is comprised between 1 and 29, in particular between 1 and 5.

[0629] Suitable covalent-bond formation conditions: As used herein, unless indicated otherwise or contradictory in context, the term “suitable covalent-bond formation conditions” means reaction conditions such as pressure, temperature, reagent quantities, solvent's type and quantity, or stirring, under which starting materials may contact and provide at least one further material resulting from the formation of at least one covalent bond between said starting materials. Suitable as covalent-bond formation conditions for implementing embodiments of the present invention preferably include substantially atmospheric conditions.

[0630] Organic spacing-compound: In the present description and unless otherwise indicated, the term “organic spacing compound” means an organic chemical radical (preferably monofunctional radical) having the ability to create a steric effect/hindrance and/or electronic effect/hindrance in a direct vicinity of a (modified) GFR-binding compound of the present disclosure. Suitable organic spacing compounds include, but are not limited to, monovalent organic radicals independently selected from the group consisting of a saturated or unsaturated hydrocarbon chain of at most 20 nanometres (nm) in length, preferably at most 10 nm, 5 nm, 1 nm, 0.5 nm, 0.1 nm, 0.05 nm or 0.01 nm, wherein said hydrocarbon chain is optionally interrupted by one or more, preferably between 1 and 16, between 1 and 12 or between 1 and 8 non-carbon atoms as appropriate, wherein said non-carbon atom is selected from the group consisting of —O—, —S—, —C(—O), —SO₂—, —N(R¹)(C═O)—, and —N(Rⁱ)—, wherein Rⁱ is selected from the group consisting of a hydrogen atom, a C1-C6 alkyl group and an aryl group, and wherein said hydrocarbon chain is non-substituted or substituted by at least one radical selected from the group consisting of a halogen, a hydroxyl group, a C1-C20 alkyl group and an aryl group. In particular, organic spacing compounds include saturated or unsaturated hydrocarbon chains comprising between 1 and 80 carbon atoms, saturated or unsaturated hydrocarbon chains comprising between 1 and 60 carbon atoms, saturated or unsaturated hydrocarbon chains comprising between 1 and 40 carbon atoms, saturated or unsaturated hydrocarbon chains comprising between 1 and 20 carbon atoms, saturated or unsaturated hydrocarbon chains comprising between 1 and 10 carbon atoms, saturated hydrocarbon chains comprising 1, 2, 3, 4, 5 or 6 carbon atoms, all of which being specifically and individually preferred. In one example, the saturated hydrocarbon chain may be methyl, ethyl, propyl, butyl or pentyl. In one example, said unsaturated hydrocarbon chain may be ethylene, propene, 1- or 2-butene, 1-, 2- or 3-pentene, acetylene, propyne, 1- or 2-butyne, 1-, 2- or 3-pentyne.

[0631] Saturated hydrocarbon chain: In the present description and unless otherwise indicated, the terms “saturated hydrocarbon chain” means a chain of carbon atoms linked together by single bonds and has hydrogen atoms filling all of the other bonding orbitals of the carbon atoms.

[0632] Unsaturated hydrocarbon chain: In the present description and unless otherwise indicated, the terms “unsaturated hydrocarbon chain” means a chain of carbon that contains carbon-carbon double bonds or triple bonds, such as those found in alkenes or alkynes, respectively.

[0633] Atmospheric conditions: As used herein, unless indicated otherwise or contradictory in context, the term “atmospheric conditions” or “ambient conditions”, which are interchangeably used, refers to conditions which may be found naturally at an experimentation location. For example, in certain embodiments, typical atmospheric conditions in a chemistry/biology laboratory are a temperature of between about 15° C. and about 35° C. and a pressure of about 1 atm.

[0634] Solution: As used herein, unless indicated otherwise or contradictory in context, the term “solution” means a homogeneous mixture composed of only one phase, which is stable, which does not allow beam of light to scatter, in which the particles of solute cannot be seen by naked eye and from which a solute cannot be separated by filtration.

[0635] Suspension: As used herein, unless indicated otherwise or contradictory in context, the term “suspension” means a heterogeneous mixture containing solid particles that are sufficiently large for sedimentation. Typically, said solid particles are larger than one micrometer. In general, the internal phase (solid) is dispersed throughout the external phase (fluid) through mechanical agitation, with the use of certain excipients or suspending agents.

[0636] Suitable non-covalent association or functionalization techniques for implementing embodiments of the present invention include, but are not limited to, association(s) between a bioactive carrier-affinity containing group as already defined herein and at least part of a bioactive carrier. Such association(s) involves the formation of at least one non-covalent interaction (or attachment) between a (modified) GFR-binding compound and a bioactive carrier as defined herein.

[0637] In one example, said functionalised bioactive carrier is functionally associated with at least two, at least three, at least four, at least five, at least six, at least seven, at least eight, at least nine or at least ten (modified) GFR-binding compounds, each possessing a different and distinct chemical structure.

[0638] In one example, said functionalised bioactive carrier does not comprise a layer of polysiloxane.

[0639] For example, in certain embodiments, a functionalised bioactive carrier as defined herein comprises at least one (modified) GFR-binding compound, and at least one bioactive carrier, wherein said bioactive carrier:
[0640] has a porosity (or average pore diameter) comprised between 1 nm and 1000 μm, as measured by scanning electronic microscopy for pore sizes within the supra-nanometre range and by atomic force microscopy for pore sizes within the nanometre range, and/or
[0641] comprises a stiffness of at least 5 kPa, preferably at least 35 kPa, as measured by Dynamic Mechanical Analysis, and/or
[0642] is selected from the group consisting of biopolymers (collagen, fibrin, . . . etc), synthetic polymers (PEEK, PET, . . . etc), solid materials (Titanium, Metals . . . etc) and ceramics (Hydroxyapatite, Beta-tricalcium Phosphate, Biphasic Calcium Phosphate . . . etc), and/or
[0643] comprises a density or concentration of associated compound (I) comprised between 0.05×10⁻¹² mol/mm² and 50×10⁻¹² mol/mm², as measured by conventional fluorescence microscopy or calculated theoretically on the basis of the peptide size, and/or
[0644] does not comprise a layer of polysiloxane.

[0645] Porosity: As used herein, unless indicated otherwise or contradictory in context, the term “porosity” refers to the measure of the void spaces in a substance or material, and is a fraction of the volume of voids over the total volume, between 0 and 1, or as a percentage between 0 and 100%. There are many ways to test and measure the porosity of a substance or material, but for the purpose of the present disclosure, and for the avoidance of any doubts, porosity values are provided in manometers (nm) as obtained using atomic force microscopy for small pore diameters (up to 100 nm) and scanning electron microscopy for larger pore sizes.

[0646] Stiffness: As used herein, unless indicated otherwise or contradictory in context, the term “stiffness” refers to the rigidity of a substance or material i.e. the extent to which it resists deformation in response to an applied force. There are many ways to test and measure the stiffness of a substance or material, but for the purpose of the present disclosure, and for the avoidance of any doubts, stiffness values are provided in Pascal (Pa) as obtained using Dynamic Mechanical Analysis (DMA). Particularly preferred stiffness values are comprised between 1 kPa and 100 kPa and not more than 5 GPa depending on the tissue to be regenerated or repaired.

[0647] As already stated, the nature of the biomaterial is an important parameter. Particularly good results have been obtained using bioactive carriers composed mostly with the main material component of the tissue to be regenerated and/or repaired. This generally allows for a better integration of the bioactive carrier, a better resorption from the surrounding cells already present and therefore a better regeneration or repair of the targeted tissue to be achieved.

[0648] In one example, said bioactive carrier for use in neuroregeneration-related applications has a stiffness comprised between about 0.01 kPa and about 3 kPa, preferably between about 0.01 kPa and about 1 kPa. In one example, said bioactive carrier for use in muscle, cartilage and T/L—related applications has a stiffness comprised between about 3 kPa and about 200 kPa, preferably between about 10 kPa and about 30 kPa. In one example, said bioactive carrier for use in bone-related applications has a stiffness comprised between about 30 kPa and about 3 GPa, preferably between about 70 kPa and about 200 kPa for instance in applications such as the treatment or prevention of osteoporosis and bone tissue regeneration. In one example, said bioactive carrier for use in hair-related applications has a stiffness comprised between about 0.01 kPa and about 200 kPa, preferably between about 3 kPa and about 70 kPa. In one example, said bioactive carrier for use in endothelization-related applications has a stiffness comprised between about 500 kPa and about 2.5 GPa. In one example, said bioactive carrier for use in angiogenesis-related applications has a stiffness comprised between about 0.01 kPa and about 100 kPa. In one example, said bioactive carrier for use in wound healing and skin—related applications has a stiffness comprised between about 0.01 kPa and about 70 kPa. For example, in certain embodiments, a pharmaceutical, dermatological or cosmetic association or combination of the present invention may be in the form of a dry, sterile powder.

[0649] In one particular example, the concentration or density (as defined herein) of a (modified) GFR-binding compound in, or on the surface of, a bioactive carrier as defined herein is comprised between 0.05 and 50 pmol/mm², in particular comprised between 0.1 and 30 pmol/mm², comprised between 0.1 and 10 pmol/mm², comprised between 0.1 and 5 pmol/mm², or comprised between 0.1 and 2 pmol/mm², each range being preferred and specifically contemplated to be combined with any other numerical or non-numerical ranges as described herein. Most particularly, the density is comprised between 0.2 and 2 pmol/mm².

[0650] VII. Medical Devices

[0651] For in-vivo administration, GFR-binding compounds, modified GFR-binding compounds or functionalised bioactive carriers of the present invention may be injected e.g. using an appropriate syringe, to a specific target site so that they may be delivered directly to the interior of e.g. a body articulation or under the skin in close proximity with the cells to be treated via, for instance, a PTD or cell-permeable peptide. Alternately, a medical device or implant (or implantable medical device) comprising such GFR-binding compounds, modified GFR-binding compounds or functionalised bioactive carriers may be used. Implants may contain reservoirs in which to place the GFR-binding compound, modified GFR-binding compound or functionalised bioactive carrier of the invention for release into the surrounding tissue, or may comprise a porous composition which may be soaked in a solution containing one or more GFR-binding compounds or modified GFR-binding compounds of the present disclosure prior to implantation.

[0652] Hydrogels, time-release capsules or spheres, liposomes, microspheres, nanospheres, biodegradable polymers, or other such drug delivery systems may also be employed to deliver GFR-binding compounds of the present invention to target cells and tissues. U.S. Pat. No. 6,475,516, for example, provides hydrogels being covalently bound to the surface of an in-dwelling medical device such as an implant, which may be used with GFR-binding compounds of the present disclosure.

[0653] In one aspect, the present disclosure provides a medical device comprising at least one GFR-compound, modified GFR-binding compound or functionalised bioactive carrier as defined herein. In one particular example, the medical device of the invention may be, partly or entirely, made of a functionalised bioactive carrier as defined herein or contain, for example, in certain embodiments, within a cavity thereof, said functionalised bioactive carrier.

[0654] In one example, said medical device may comprise between 1 wt % and 100 wt % of a functionalised bioactive carrier of the invention with respect to the total weight of the medical device. In one example, said medical device comprises between about 50 wt % and 100 wt %, between about 60 wt % and 100 wt %, between about 70 wt % and 100 wt %, between about 80 wt % and 100 wt %, between about 90 wt % and 100 wt % of a functionalised bioactive carrier of the invention with respect to the total weight of the medical device, all of which being specifically and individually preferred.

[0655] In an example, at least one part of a surface of said medical device comprises a GFR-binding compound, a modified GFR-binding compound or a functionalised bioactive carrier of the invention. For example, in certain embodiments, said medical device is preferably an implantable medical device.

[0656] Also suitable as medical devices for implementing embodiments of the present invention include stents, stiches, powders, granules, sponges, putties, injectable and non-injectable liquids, curable compositions, moldable compositions, membranes, glues, sprays, pills, filaments, prosthesis, or combinations thereof.

[0657] In one aspect, the present disclosure provides a bone graft material comprising a GFR-binding compound or a modified GFR-binding compound of the invention and a collagen as defined herein. In the present description and unless otherwise indicated, the term “bone graft material” means a material suitable for bone grafting.

[0658] VIII. Antibody:GFR-Binding Compound Complex

[0659] In one aspect, the present disclosure provides an antibody:GFR-binding compound complex comprising at least one (modified) GFR-binding compound and at least one antibody or any functional fragment thereof; wherein said (modified) GFR-binding compound is as defined herein.

[0660] Antibody: As used herein, unless indicated otherwise or contradictory in context, the terms “antibody” or “antibodies” refer to a light chain and heavy chain protein of an antibody that are encoded by a gene or genes that are either a naturally occurring gene or a codon-optimized gene. The antibody light chain and heavy chain genes may be human antibody light chain and heavy chain genes. Antibodies, or immunoglobulins, are proteins produced by cells of the immune system to identify and neutralize foreign substances, such as bacteria, viruses, or improperly proliferating native cells. Immunoglobulins are one class of desired globulin molecules and include, but are not limited to, IgG, IgM, IgA, IgD, IgE, IgY, lambda chains, kappa chains and fragments thereof; bi-specific antibodies, and fragments thereof; scFv fragments, Fc fragments, and Fab fragments as well as dimeric, trimeric and oligomeric forms of antibody fragments. Suitable antibodies include, but are not limited to, naturally occurring antibodies, animal-specific antibodies, human antibodies, humanized antibodies, autoantibodies and hybrid antibodies. Suitable antibodies also include antibodies with the ability to bind specific ligands. Suitable antibodies also include, but are not limited to, primary antibodies, secondary antibodies, designer antibodies, anti-protein antibodies, anti-peptide antibodies, anti-DNA antibodies, anti-RNA antibodies, anti-hormone antibodies, anti-hypophysiotropic peptides, antibodies against non-natural antigens, anti-anterior pituitary hormone antibodies, anti-posterior pituitary hormone antibodies, anti-venom antibodies, anti-tumor marker antibodies, antibodies directed against epitopes associated with infectious disease, including, anti-viral, anti-bacterial, anti-protozoal, anti-fungal, anti-parasitic, anti-receptor, anti-lipid, anti-phospholipid, anti-growth factor, anti-cytokine, anti-monokine, antiidiotype, and anti-accessory (presentation) protein antibodies. Suitable antibodies also include, but are not limited to, 3F8, 8H9, Abagovomab, Abciximab, Abituzumab, Abrilumab, Actoxumab, Adalimumab, Adecatumumab, Aducanumab, Afelimomab, Afutuzumab, Alacizumab pegol, ALD518, Alemtuzumab, Alirocumab, Altumomab pentetate, Amatuximab, Anatumomab mafenatox, Anetumab ravtansine, Anifrolumab, Anrukinzumab, Apolizumab, Arcitumomab, Ascrinvacumab, Aselizumab, Atezolizumab, Atinumab, Atlizumab, Atorolimumab, Bapineuzumab, Basiliximab, Bavituximab, Bectumomab, Begelomab, Belimumab, Benralizumab, Bertilimumab, Besilesomab, Bevacizumab, Beziotoxumab, Biciromab, Bimagrumab, Bimekizumab, Bivatuzumab mertansine, Blinatumomab, Blosozumab, Bococizumab, Brentuximab vedotin, Briakinumab, Brodalumab, Brolucizumab, Brontictuzumab, Canakinumab, Cantuzumab mertansine, Cantuzumab ravtansine, Caplacizumab, Capromab pendetide, Carlumab, Catumaxomab, cBR96-doxorubicin immunoconjugate, CC49, Cedelizumab, Certolizumab pegol, Cetuximab, Ch.14.18, Citatuzumab bogatox, Cixutumumab, Clazakizumab, Clenoliximab, Clivatuzumab tetraxetan, Codrituzumab, Coltuximab ravtansine, Conatumumab, Concizumab, CR6261, Crenezumab, Dacetuzumab, Daclizumab, Dalotuzumab, Dapirolizumab pegol, Daratumumab, Dectrekumab, Demcizumab, Denintuzumab mafodotin, Denosumab, Derlotuximab biotin, Detumomab, Dinutuximab, Diridavumab, Dorlimomab aritox, Drozitumab, Duligotumab, Dupilumab, Durvalumab, Dusigitumab, Ecromeximab, Eculizumab, Edobacomab, Edrecolomab, Efalizumab, Efungumab, Eldelumab, Elgemtumab, Elotuzumab, Elsilimomab, Emactuzumab, Emibetuzumab, Enavatuzumab, Enfortumab vedotin, Enlimomab pegol, Enoblituzumab, Enokizumab, Enoticumab, Ensituximab, Epitumomab cituxetan, Epratuzumab, Erlizumab, Ertumaxomab, Etaracizumab, Etrolizumab, Evinacumab, Evolocumab, Exbivirumab, Fanolesomab, Faralimomab, Farletuzumab, Fasinumab, FBTA05, Felvizumab, Fezakinumab, Ficlatuzumab, Figitumumab, Firivumab, Flanvotumab, Fletikumab, Fontolizumab, Foralumab, Foravirumab, Fresolimumab, Fulranumab, Futuximab, Galiximab, Ganitumab, Gantenerumab, Gavilimomab, Gemtuzumab ozogamicin, Gevokizumab, Girentuximab, Glembatumumab vedotin, Golimumab, Gomiliximab, Gusekumab, balizumab, Ibritumomab tiuxetan, Icrucumab, Idarucizumab, Igovomab, IMAB362, Imalumab, Imciromab, Imgatuzumab, Inclacumab, Indatuximab ravtansine, Indusatumab vedotin, Infliximab, Inolimomab, Inotuzumab ozogamicin, Intetumumab, Ipilimumab, Iratumumab, Isatuximab, Itolizumab, Ixekizumab, Keliximab, Labetuzumab, Lambrolizumab, Lampalizumab, Lebrikizumab, Lemalesomab, Lenzilumab, Lerdelimumab, Lexatumumab, Libivirumab, Lifastuzumab vedotin, Ligelizumab, Lilotomab satetraxetan, Lintuzumab, Lirilumab, Lodelcizumab, Lokivetmab, Lorvotuzumab mertansine, Lucatumumab, Lulizumab pegol, Lumiliximab, Lumretuzumab, Mapatumumab, Margetuximab, Maslimomab, Matuzumab, Mavrilimumab, Mepolizumab, Metelimumab, Milatuzumab, Minretumomab, Mirvetuximab soravtansine, Mitumomab, Mogamulizumab, Morolimumab, Motavizumab, Moxetumomab pasudotox, Muromonab-CD3, Nacolomab tafenatox, Namilumab, Naptumomab estafenatox, Narnatumab, Natalizumab, Nebacumab, Necitumumab, Nemolizumab, Nerelimomab, Nesvacumab, Nimotuzumab, Nivolumab, Nofetumomab merpentan, Obiltoxaximab, Ocaratuzumab, Ocrelizumab, Odulimomab, Ofatumumab, Olaratumab, Olokizumab, Omalizumab, Onartuzumab, Ontuxizumab, Opicinumab, Oportuzumab monatox, Oregovomab, Orticumab, Otelixizumab, Otlertuzumab, Oxelumab, Ozanezumab, Ozoralizumab, Pagibaximab, Palivizumab, Panitumumab, Pankomab, Panobacumab, Parsatuzumab, Pascolizumab, Pasotuxizumab, Pateclizumab, Patritumab, Pembrolizumab, Pemtumomab, Perakizumab, Pertuzumab, Pexelizumab, Pidilizumab, Pinatuzumab vedotin, Pintumomab, Placulumab, Polatuzumab vedotin, Ponezumab, Priliximab, Pritoxaximab, Pritumumab, PRO 140, Quilizumab, Racotumomab, Radretumab, Rafivirumab, Ralpancizumab, Ramucirumab, Ranibizumab, Raxibacumab, Refanezumab, Regavirumab, Reslizumab, Rilotumumab, Rinucumab, Rituximab, Robatumumab, Roledumab, Romosozumab, Rontalizumab, Rovelizumab, Ruplizumab, Sacituzumab govitecan, Samalizumab, Sarilumab, Satumomab pendetide, Secukinumab, Seribantumab, Setoxaximab, Sevirumab, SGN-CD19A, SGN-CD33A, Sbrotuzumab, Sifalimumab, Siltuximab, Simtuzumab, Siplizumab, Sirukumab, Sofituzumab vedotin, Solanezumab, Solitomab, Sonepcizumab, Sontuzumab, Stamulumab, Sulesomab, Suvizumab, Tabalumab, Tacatuzumab tetraxetan, Tadocizumab, Talizumab, Tanezumab, Taplitumomab paptox, Tarextumab, Tefibazumab, Telimomab aritox, Tenatumomab, Teneliximab, Teplizumab, Teprotumumab, Tesidolumab, TGN1412, Ticilimumab, Tigatuzumab, Tildrakizumab, TNX-650, Tocilizumab, Toralizumab, Tosatoxumab, Tositumomab, Tovetumab, Tralokinumab, Trastuzumab, TRBS07, Tregalizumab, Tremelimumab, Trevogrumab, Tucotuzumab celmoleukin, Tuvirumab, Ublituximab, Ulocuplumab, Urelumab, Urtoxazumab, Ustekinumab, Vandortuzumab vedotin, Vantictumab, Vanucizumab, Vapaliximab, Varlilumab, Vatelizumab, Vedolizumab, Veltuzumab, Vepalimomab, Vesencumab, Visilizumab, Volociximab, Vorsetuzumab mafodotin, Votumumab, Zalutumumab, Zanolimumab, Zatuximab, Ziralimumab, or Zolimomab aritox.

[0661] In certain embodiments, said antibody:GFR-binding compound complex is a covalent complex. In certain embodiments, said antibody:GFR-binding compound complex is a non-covalent complex.

[0662] IX. Dendrimer:GFR-Binding Compound Complex

[0663] In one aspect, the present disclosure provides a dendrimer:GFR-binding compound complex comprising at least one (modified) GFR-binding compound and at least one dendrimer or any functional fragment thereof; wherein said (modified) GFR-binding compound is as defined herein; and wherein said dendrimer is as already defined herein.

[0664] In certain embodiments, said dendrimer:GFR-binding compound complex is a covalent complex. In certain embodiments, said dendrimer:GFR-binding compound complex is a non-covalent complex.

[0665] X. Polynucleotides

[0666] The extracellular biological action of the GFR-binding peptides may also be conveyed via expression, by a cell, of the appropriate polynucleotide sequence engineered to encode a particular GFR-binding peptide of interest. One may thus inject or administer, to a mammal subject, a GFR-binding-peptide-encoding polynucleotide (such as a messenger RNA), wherein said polynucleotide would enable the intracellular production of the encoded GFR-binding peptide, which may, once released outside the host cell, exert its extracellular action on the host cell and/or on neighbouring cells and/or distant cells. In other words, GFR-binding peptides may be produced ex-vivo (e.g. using a peptide synthesizer) or in-vivo (e.g. via cell expression of a GFR-binding-peptide-encoding polynucleotide), and in all cases have an extracellular biological action of activation of growth factor receptors to induce cell differentiation and/or tissue regeneration.

[0667] Thus, in one aspect, the present disclosure provides a polynucleotide encoding at least one peptide as disclosed herein. In one particular example, said polynucleotide is a messenger RNA or a primary construct thereof. Said messenger RNA may additionally have a 5′ cap structure chosen from the group consisting of m⁷G(5′)ppp (5′)A,G(5′)ppp(5′)A and G(5′)ppp(5′)G. In one example, the messenger RNA additionally has a poly-A tail of from about 10 to 200 adenosine nucleotides. In one example, the messenger RNA additionally has a poly-C tail of from about 10 to 200 cytosine nucleotides. In one example, the messenger RNA additionally codes a tag for purification chosen from the group consisting of a hexahistidine tag (HIS tag, polyhistidine tag), a streptavidin tag (Strep tag), an SBP tag (streptavidin-binding tag) or a GST (glutathione S-transferase) tag, or codes for a tag for purification via an antibody epitope chosen from the group consisting of antibody-binding tags, a Myc tag, a Swal 1 epitope, a FLAG tag or an HA tag. In one example, the messenger RNA additionally codes a signal peptide and/or a localization sequence, in particular a secretion sequence. In one example, said polynucleotide is a complementary DNA of said messenger RNA or a primary construct thereof.

[0668] In one aspect, the present disclosure also provides a vector comprising a polynucleotide as defined in the present disclosure.

[0669] In one aspect, the present disclosure also provides a cultured cell comprising a vector as defined in the present disclosure.

[0670] In one aspect, the present disclosure also provides a method of expressing a peptide of interest, variant or analog thereof, in a mammalian cell, said method comprising: (i) providing an mRNA as defined in the present disclosure; and (ii) introducing said mRNA to a mammalian cell under conditions that permit the expression of the peptide of interest by the mammalian cell.

[0671] In one aspect, the present disclosure also provides a mRNA as disclosed herein for use in a medical treatment or prophylactic method. In one example, said medical treatment method is a therapeutic, surgical, or diagnostic method. In one particular example, said method is a method for treating or preventing cell-degeneration-associated diseases, disorders, conditions, or pathologies as defined in the present disclosure. In one particular example, said method is a method for regenerating mammalian tissues as disclosed herein.

[0672] In one aspect, the present disclosure also provides a use of a RNA or mRNA as defined in the present disclosure for the preparation of a pharmaceutical composition for the treatment or prevention of cell-degeneration-associated diseases, disorders, conditions, or pathologies as disclosed herein.

[0673] In one aspect, the present disclosure also provides a medical composition comprising a polynucleotide, a vector, or a transfected cel, all as defined in the present disclosure, and a medically acceptable excipient or carrier.

[0674] Expression: As used herein, “expression” of a nucleic acid sequence refers to one or more of the following events: (1) production of an RNA template from a DNA sequence (e.g., by transcription); (2) processing of an RNA transcript (e.g., by splicing, editing, 5′ cap formation, and/or 3′ end processing); (3) translation of an RNA into a polypeptide or protein; and (4) post-translational modification of a polypeptide or protein.

[0675] mRNA: As used herein, the term “mRNA” refers to messenger RNA. Traditionally, the basic components of an mRNA molecule include at least a coding region, a 5′UTR, a 3′UTR, a 5′cap and a poly-A tail. Whereas the 5′UTR, 3′UTR, 5′cap and the poly-A tail are usually required to improve e.g. stability, translation and/or recognition by the ribosome, it is the coding region which comprises the sequence encoding the protein(s), polypeptide(s), or peptide(s) of (therapeutic) interest. Therefore, when the mRNA molecule as disclosed herein is conventionally described with reference to its coding region, any mRNA molecule also comprising at least one of a 5′UTR, a 3′UTR, a 5′cap or a poly-A tail forms an integral part of the present disclosure.

[0676] Coding region: As used herein, the term “coding region” or “coding sequence” refers to a portion of a polynucleotide that codes for a peptide or peptides of interest.

[0677] Primary RNA construct or transcript: As used herein, unless indicated otherwise or contradictory in context, the term “Primary RNA construct” or “Primary RNA transcript” refers to any precursor RNA molecule from a mature and functional (i.e. translatable) RNA molecule may be obtained. For instance, a precursor messenger RNA (pre-mRNA) is a type of primary transcript that becomes a messenger RNA (mRNA) after processing. Newly synthesized primary transcripts are modified in several ways to yield their mature form before they can be translated into a protein of interest. Such modifications include, but are not limited to, excision of introns, splicing of exons, addition of 5′cap and poly-A tail. Therefore, when reference is made to an RNA molecule, it shall be understood that it aims to cover all RNA molecules including, but not limited to, primary RNA transcripts or constructs at any stage of the modification process leading to a mature and functional RNA molecule e.g. with or without introns, exons, 5′cap, poly-A tail and/or any other conventional modifications, insofar as the RNA molecule contains a coding region or a precursor thereof allowing for a peptide of interest encoded by said coding region or precursor thereof to be expressed.

[0678] 5′ Capping: As used herein, unless indicated otherwise or contradictory in context, the term “5′ Capping” ou “5′ Cap” refers to a 5′ cap structure of an mRNA that is involved in nuclear export, increasing mRNA stability and binds the mRNA Cap Binding Protein (CBP), which is responsible for mRNA stability in the cell and translation competency through the association of CBP with poly(A) binding protein to form the mature cyclic mRNA species. The cap further assists the removal of 5′ proximal introns removal during mRNA splicing. Endogenous mRNA molecules may be 5′-end capped generating a 5′-ppp-5′-triphosphate linkage between a terminal guanosine cap residue and the 5′-terminal transcribed sense nucleotide of the mRNA molecule. This 5′-guanylate cap may then be methylated to generate an N7-methyl-guanylate residue.

[0679] Poly-A tails: During RNA processing, a long chain of adenine nucleotides (poly-A tail) may be added to a polynucleotide such as an mRNA molecules in order to increase stability. Immediately after transcription, the 3′ end of the transcript may be cleaved to free a 3′ hydroxyl. Then poly-A polymerase adds a chain of adenine nucleotides to the RNA. The process, called polyadenylation, adds a poly-A tail that can be between, for example, approximately 100 and 250 residues long.

[0680] Untranslated regions: As used herein, the term “Untranslated regions” or UTRs of a gene refers to regions that are transcribed but not translated. The 5′UTR starts at the transcription start site and continues to the start codon but does not include the start codon; whereas, the 3′UTR starts immediately following the stop codon and continues until the transcriptional termination signal. The regulatory features of a UTR can be incorporated into the polynucleotides, primary constructs and/or mRNA of the present disclosure to enhance the stability of the molecule.

[0681] 3′UTR: As used herein, unless indicated otherwise or contradictory in context, the term “3′UTR” or “three prime untranslated region” refers to the section of messenger RNA that immediately follows the translation termination codon. The 3′-UTR often contains regulatory regions that post-transcriptionally influence gene expression.

[0682] 5′UTR: As used herein, unless indicated otherwise or contradictory in context, the term “5′UTR” or “five prime untranslated region” refers to the section of mRNA that starts at the transcription start site and continues to the start codon but does not include the start codon. There is growing body of evidence about the regulatory roles played by the UTRs in terms of stability of the nucleic acid molecule and translation. Natural 5′UTRs bear features which play roles in for translation initiation. 5′UTR also have been known to form secondary structures which are involved in elongation factor binding.

[0683] Complementary DNA: As used herein, the term “complementary DNA” or “cDNA” refers to a DNA molecule containing an eukaryote gene which has been tailored or engineered to be expressed in a prokaryote host cell. cDNA is also called “intron-free” DNA as it lacks the gene regions encoding introns, its transcription yielding an intron-free mRNA molecule.

[0684] In one aspect, the present disclosure provides a vector comprising a polynucleotide encoding at least one peptide, variant or analog thereof, having growth factor receptor-binding capability or capabilities, as defined herein.

[0685] Vector: As used herein, unless indicated otherwise or contradictory in context, the term “vector” is used in its most general meaning and refers to any intermediary vehicle for a nucleic acid which enables said nucleic acid, for example, to be introduced into prokaryotic and/or eukaryotic cells and, where appropriate, to be integrated into a genome. Vectors of this kind are preferably replicated and/or expressed in the cells. Vectors may comprise plasmids, phagemids, bacteriophages or viral genomes.

[0686] Plasmid: As used herein, unless indicated otherwise or contradictory in context, the term “plasmid” refers to a double-stranded (which may be circular) DNA sequence that is capable of automatically replicating in a host cell.

[0687] In one aspect, the present disclosure provides a cultured cell (or transfected cell) comprising a polynucleotide encoding at least one peptide, variant or analog thereof, having growth factor receptor-binding capability or capabilities, as defined herein.

[0688] In one aspect, the present disclosure provides a medical composition comprising at least one of a polynucleotide encoding at least one peptide, variant or analog thereof, having growth factor receptor-binding capability or capabilities, as defined herein, a vector comprising such a polynucleotide, or a transfected cell comprising such a vector, and a medically acceptable carrier.

[0689] In one aspect, the present disclosure provides methods and uses for inducing cell differentiation, regenerating tissues and protecting a patient from cell-degeneration-related diseases, conditions, disorders or pathologies, using at least one of a polynucleotide encoding at least one peptide, variant or analog thereof, having growth factor receptor-binding capability or capabilities, as defined herein, a vector comprising such a polynucleotide, a transfected cell comprising such a vector, or a medical composition comprising them.

[0690] XI. Pharmaceutical Compositions

[0691] The present disclosure provides GFR-binding compounds, modified GFR-binding compounds and functionalised bioactive carrier, which may be used for inducing stem cell differentiation and tissue regeneration.

[0692] In one aspect, the present disclosure provides a composition such as a pharmaceutical, prophylactic, surgical, diagnostic, or imaging composition (hereinafter shorten as pharmaceutical or medical composition) comprising at least one (modified) GFR-binding compound or a functionalised bioactive carrier as defined herein and further comprising at least one pharmaceutically acceptable excipient carriers and/or vehicles.

[0693] Formulations of the pharmaceutical compositions described herein may be prepared by any method known or hereafter developed in the art of pharmacology. Generally, such methods of preparation include the step of bringing the active ingredient(s) into association with an excipient and/or one or more other accessory ingredients, and then, if necessary and/or desirable, shaping and/or packaging the product into a desired single- or multi-dose unit.

[0694] For example, in certain embodiments, a pharmaceutical composition as defined herein may contain between 0.01% and 100% by weight (over the total weight of the pharmaceutical composition) of a (modified) GFR-binding compound or a functionalised bioactive carrier, both as defined herein, as a pharmaceutically effective amount. The pharmaceutical composition particularly comprises between 0.01% and 95%, between 0.01% and 90%, between 0.01% and 85%, between 0.01% and 80%, between 0.01% and 75%, between 0.01% and 70%, between 0.01% and 65%, between 0.01% and 60%, between 0.01% and 55%, between 0.01% and 50%, between 0.01% and 45%, between 0.01% and 40%, between 0.01% and 35%, between 0.01% and 30%, between 0.01% and 25%, between 0.01% and 20%, between 0.01% and 15%, between 0.01% and 10%, between 0.01% and 5%, between 0.1% and 100%, between 0.1% and 95%, between 0.1% and 90%, between 0.1% and 85%, between 0.1% and 80%, between 0.1% and 75%, between 0.1% and 70%, between 0.1% and 65%, between 0.1% and 60%, between 0.1% and 55%, between 0.1% and 50%, between 0.1% and 45%, between 0.1% and 40%, between 0.1% and 35%, between 0.1% and 30%, between 0.1% and 25%, between 0.1% and 20%, between 0.1% and 15%, between 0.1% and 10%, and between 0.1% and 5% by weight (over the total weight of the pharmaceutical composition) of any one of a (modified) GFR-binding compound or a functionalised bioactive carrier as defined herein.

[0695] Generally, the (modified) GFR-binding compounds or functionalised bioactive carriers as defined herein may thus be administered as such or as part of a formulation in association with one or more pharmaceutically acceptable excipients, carriers and/or vehicles so as to form what is generally referred to as a pharmaceutical composition or pharmaceutical formulation.

[0696] Pharmaceutical effective amount: As used herein, unless indicated otherwise or contradictory in context, the term “pharmaceutical effective amount” or “therapeutically effective amount” refers to an amount of an agent to be delivered (e.g., nucleic acid, protein, peptide, drug, therapeutic agent, diagnostic agent, prophylactic agent, etc.) that is sufficient, when administered to a subject suffering from or susceptible to an infection, disease, disorder, condition and/or pathology, to produce/provide a therapeutically effective outcome. Thus, a “pharmaceutical effective amount” depends upon the context in which it is being applied. A pharmaceutical effective amount of a composition is provided based, at least in part, on the target tissue, target cell type, means of administration, physical characteristics of the pharmaceutical association or composition (e.g., size, 3D shape, etc.), and other determinants. For example, in certain embodiments, in the context of providing an agent that induces tissue regeneration, a pharmaceutical effective amount of an agent is, for example, in certain embodiments, an amount sufficient to achieve tissue regeneration, as compared to the response obtained without provision of the agent. For example, in certain embodiments, a therapeutically effective amount as used herein is any of the herein disclosed weight or molar amounts, ratios or ranges of the (modified) GFR-binding compound or functionalised bioactive carrier.

[0697] Therapeutically effective outcome: As used herein, unless indicated otherwise or contradictory in context, the term “therapeutically effective outcome” refers to an outcome that is sufficient in a subject suffering from or susceptible to an infection, disease, disorder, condition and/or pathology, to treat, improve symptoms of, diagnose, prevent, and/or delay the onset of the infection, disease, disorder, condition and/or pathology.

[0698] Therapeutic Agent: As used herein, unless indicated otherwise or contradictory in context, the term “therapeutic agent” refers to any agent that, when administered to a subject/patient/individual, has a therapeutic, diagnostic, and/or prophylactic effect and/or elicits a desired biological and/or pharmacological effect.

[0699] Pharmaceutically acceptable: As used herein, unless indicated otherwise or contradictory in context, the term “pharmaceutically acceptable” refers to those compounds, materials, compositions, and/or dosage forms which are, within the ambit of sound medical judgment, suitable for use in contact with the tissues of human beings and animals without excessive toxicity, irritation, allergic response, or other problem or complication, commensurate with a reasonable benefit/risk ratio.

[0700] Pharmaceutically acceptable excipients: As used herein, unless indicated otherwise or contradictory in context, the term “pharmaceutically acceptable excipient” refers to any ingredient other than the compounds described herein (i.e. GFR-binding compounds, bioactive carriers as defined herein or any further active principles) and satisfying to the herein defined definition of pharmaceutically acceptable for a patient. Excipients may include, for example: inert diluents, dispersing and/or granulating agents, surface active agents and/or emulsifiers, disintegrating agents, binding agents, preservatives, buffering agents, lubricating agents, oils, printing inks, sweeteners, and/or waters of hydration. The choice of excipient(s) will largely depend on factors such as the particular mode of administration, the effect of the excipient(s) on solubility and stability, and the nature of the dosage form. In one embodiment, the pharmaceutically acceptable excipient is not a naturally occurring excipient.

[0701] Diluents: As used herein, unless indicated otherwise or contradictory in context, diluents include, but are not limited to, calcium carbonate, sodium carbonate, calcium phosphate, dicalcium phosphate, calcium sulfate, calcium hydrogen phosphate, sodium phosphate lactose, sucrose, cellulose, microcrystalline cellulose, kaolin, mannitol, sorbitol, inositol, sodium chloride, dry starch, powdered sugar and/or any combinations thereof.

[0702] Buffering agents: As used herein, unless indicated otherwise or contradictory in context, buffering agents include, but are not limited to, citrate buffer solutions, acetate buffer solutions, phosphate buffer solutions, ammonium chloride, potassium acetate, potassium chloride, monobasic potassium phosphate, calcium carbonate, calcium chloride, calcium citrate, calcium gluconate, calcium lactate, propanoic acid, calcium levulinate, pentanoic acid, phosphoric acid, calcium hydroxide phosphate, sodium acetate, sodium bicarbonate, sodium chloride, sodium citrate, sodium lactate, magnesium hydroxide, aluminum hydroxide, alginic acid, pyrogen-free water, isotonic saline, Ringer's solution, ethyl alcohol and any combinations thereof.

[0703] Granulating and/or dispersing agents: As used herein, unless indicated otherwise or contradictory in context, granulating and/or dispersing agents include, but are not limited to, potato starch, corn starch, tapioca starch, sodium starch glycolate, clays, alginic acid, guar gum, citrus pulp, agar, bentonite, cellulose and wood products, natural sponge, cation-exchange resins, calcium carbonate, silicates, sodium carbonate, cross-linked poly(vinyl-pyrrolidone), sodium carboxymethyl starch, carboxymethyl cellulose, cross-linked sodium carboxymethyl cellulose, methylcellulose, pregelatinized starch, microcrystalline starch, water insoluble starch, calcium carboxymethyl cellulose, magnesium aluminum silicate, sodium lauryl sulfate, quaternary ammonium compounds and/or any combinations thereof.

[0704] Surface active agents and/or emulsifiers: As used herein, unless indicated otherwise or contradictory in context, surface active agents and/or emulsifiers include, but are not limited to, colloidal clays (such as aluminum silicates and magnesium aluminum silicates), natural emulsifiers (such as acacia, agar, sodium alginate, cholesterol, xanthan, pectin, gelatin, egg yolk, casein, cholesterol, wax, and lecithin), long chain amino acid derivatives, high molecular weight alcohols (such as stearyl, cetyl and oleyl alcohols, triacetin monostearate, ethylene glycol distearate and glyceryl monostearate), carbomers (such as carboxy polymethylene, polyacrylic acid, acrylic acid polymer, and carboxyvinyl polymer), diethylene glycol monolaurate, triethanolamine oleate, sodium oleate, potassium oleate, ethyl oleate, oleic acid, ethyl laurate, sodium lauryl sulfate, cetrimonium bromide, cetylpyridinium chloride, benzalkonium chloride, docusate sodium, carrageenan, cellulosic derivatives (such as carboxymethylcellulose sodium, hydroxymethyl cellulose, hydroxypropyl methylcellulose and methylcellulose), sorbitan fatty acid esters (such as polyoxyethylene sorbitan monolaurate, polyoxyethylene sorbitan, polyoxyethylene sorbitan monooleate, sorbitan monopalmitate and glyceryl monooleate), polyoxyethylene esters, sucrose fatty acid esters, polyethylene glycol fatty acid esters, polyoxyethylene ethers, poly(vinyl-pyrrolidone), and any combinations thereof.

[0705] Binding agents: As used herein, unless indicated otherwise or contradictory in context, binding agents include, but are not limited to, natural and synthetic gums (such as acacia, sodium alginate, carboxymethylcellulose, methylcellulose, ethylcellulose, hydroxyethylcellulose, hydroxypropyl cellulose, hydroxypropyl methylcellulose, microcrystalline cellulose, cellulose acetate and poly(vinyl-pyrrolidone), gelatin, starch, sugars (such as sucrose, dextrose, glucose, dextrin, lactose, and mannitol), alignates, magnesium aluminum silicates, polyethylene glycol, polyethylene oxide, inorganic calcium salts, water, alcohol, silicic acid, waxes, and any combinations thereof.

[0706] Preservatives: As used herein, unless indicated otherwise or contradictory in context, preservatives include, but are not limited to, antioxidants, chelating agents, antifungal preservatives, antimicrobial preservatives, acidic preservatives, and alcohol preservatives.

[0707] Antioxidants: As used herein, unless indicated otherwise or contradictory in context, antioxidants include, but are not limited to, alpha tocopherol, ascorbic acid, acorbyl palmitate, butylated hydroxyanisole, propionic acid, potassium metabisulfite, propyl gallate, sodium metabisulfite, sodium ascorbate, and sodium sulfite.

[0708] Chelating agents: As used herein, unless indicated otherwise or contradictory in context, chelating agents include ethylenediaminetetraacetic acid (EDTA), fumaric acid, malic acid, phosphoric acid, citric acid monohydrate and tartaric acid.

[0709] Antimicrobial preservatives: As used herein, unless indicated otherwise or contradictory in context, antimicrobial preservatives include, but are not limited to, benzalkonium chloride, benzethonium chloride, chlorhexidine, chlorobutanol, chlorocresol, chloroxylenol, benzyl alcohol, bronopol, cetylpyridinium chloride, cresol, ethyl alcohol, glycerin, hexetidine, imidurea, phenoxyethanol, phenylmercuric nitrate, phenylethyl alcohol, phenol, and propylene glycol.

[0710] Antifungal preservatives: As used herein, unless indicated otherwise or contradictory in context, antifungal preservatives include, but are not limited to, benzoic acid, hydroxybenzoic acid, butyl paraben, methyl paraben, ethyl paraben, propyl paraben, potassium benzoate, sodium propionate, potassium sorbate, and/or sorbic acid.

[0711] Alcohol preservatives: As used herein, unless indicated otherwise or contradictory in context, alcohol preservatives include, but are not limited to, phenol, phenolic compounds, bisphenol, ethanol, polyethylene glycol, chlorobutanol and hydroxybenzoate.

[0712] Acidic privatives: As used herein, unless indicated otherwise or contradictory in context, acidic preservatives include, but are not limited to, vitamin A, vitamin C, vitamin E, beta-carotene, acetic acid, citric acid, dehydroacetic acid, and sorbic acid.

[0713] Lubricating agents: As used herein, unless indicated otherwise or contradictory in context, lubricating agents include, but are not limited to, magnesium stearate, calcium stearate, stearic acid, sodium benzoate, sodium acetate, sodium chloride, silica, talc, malt, glyceryl behenate, hydrogenated vegetable oils, polyethylene glycol, magnesium lauryl sulphate and any combinations thereof.

[0714] Sweeteners: As used herein, unless indicated otherwise or contradictory in context, sweeteners include, but are not limited to, any natural or synthetic sugar substitutes. Natural sugar substitutes include, but are not limited to, brazzein, curculin, erythritol, glycyrrhizin, glycerol, hydrogenated starch hydrolysates, inulin, isomalt, lactitol, mogroside mix, mabinlin, maltitol, malto-oligosaccharide, mannitol, miraculin, monatin, monellin, osladin, pentadin, sorbitol, stevia, tagatose, thaumatin, and xylitol. Synthetic sugar substitutes include, but are not limited to, acesulfame potassium, advantame, alitame, aspartame, salt of aspartame-acesulfame, sodium cyclamate, dulcin, glucin, neohesperidin dihydrochalcone, neotame, P-4000, saccharin, Sucralose.

[0715] Exemplary excipients include, but are not limited to: butylated hydroxytoluene (BHT), calcium carbonate, calcium phosphate (dibasic), calcium stearate, croscarmellose, crosslinked polyvinyl pyrrolidone, citric acid, crospovidone, cysteine, ethylcellulose, gelatin, hydroxypropyl cellulose, hydroxypropyl methylcellulose, lactose, magnesium stearate, maltitol, mannitol, methionine, methylcellulose, methyl paraben, microcrystalline cellulose, polyethylene glycol, polyvinyl pyrrolidone, povidone, pregelatinized starch, propyl paraben, retinyl palmitate, shellac, silicon dioxide, sodium carboxymethyl cellulose, sodium citrate, sodium starch glycolate, sorbitol, starch, stearic acid, sucrose, talc, titanium dioxide, vitamin A, vitamin E, vitamin C, and xylitol. Suitable excipients for use in the present invention also include, but are not limited to, water, phosphate buffered saline (PBS), Ringer's solution, dextrose solution, serum-containing solutions, Hank's solution, other aqueous physiologically balanced solutions, oils, esters and glycols. Aqueous excipients can contain suitable auxiliary substances required to approximate the physiological conditions of the recipient, for example, in certain embodiments, by enhancing chemical stability and isotonicity.

[0716] Pharmaceutically acceptable carriers: As used herein, unless indicated otherwise or contradictory in context, the term “pharmaceutically acceptable carriers” or “carriers” refers to pharmaceutically acceptable excipients and/or delivery vehicles suitable for delivering a pharmaceutical or therapeutic composition useful in a therapeutic method and uses of the present invention to a suitable in-vivo or ex-vivo site.

[0717] Preferred pharmaceutically acceptable carriers are capable of maintaining a composition containing an active combination or association of a (modified) GFR-binding compound and a bioactive carrier as defined herein, in a form that, upon arrival of the combination to a target cell, site or tissue, the active combination is capable of performing one or more biological functions thereof the protein at the cell or tissue site. One type of pharmaceutically acceptable carrier includes a controlled release formulation that is capable of slowly releasing a composition or combination into an animal. In one example, a controlled release formulation comprises an active combination or association as defined herein in a controlled release vehicle. Suitable controlled release vehicles include, but are not limited to, microparticles, biocompatible polymers, other polymeric matrices, capsules, microcapsules, osmotic pumps, bolus preparations, diffusion devices, liposomes, lipospheres, and transdermal delivery systems. Such suitable controlled release vehicle may be combined with at least one targeting moiety. In one embodiment, the pharmaceutically acceptable carrier Is not a naturally occurring carrier.

[0718] Targeting Moieties: In one example, the functionalised bioactive carrier disclosed herein includes at least one binding partner which functions to target the cell to a specific tissue space or to interact with a specific moiety, either in-vivo, ex-vivo or in-vitro. Suitable binding partners include antibodies and functional fragments thereof, scaffold proteins, or peptides.

[0719] In one example, said excipients, carriers or vehicles are compatible with the (modified) GFR-binding compounds or functionalised bioactive carriers defined herein so that they do not disrupt, tamper, modify, de-organise, de-combine or de-associate said the (modified) GFR-binding compounds or functionalised bioactive carriers. In contrast, said excipients, carriers or vehicles preserves, maintains or reinforces the stability of the (modified) GFR-binding compounds or functionalised bioactive carriers so as to preserve their biological activity.

[0720] In one example, the present pharmaceutical compositions also include pharmaceutically acceptable salts and/or solvates and/or prodrugs and/or isotopically-labelled derivatives of the substances and compounds described herein such as the (modified) GFR-binding compounds or any other active principles.

[0721] Pharmaceutically acceptable salts: As used herein, unless indicated otherwise or contradictory in context, the term “pharmaceutically acceptable salts” refers to derivatives of the disclosed substances and compounds wherein the parent substance or compound is modified by converting an existing acid or base moiety to its salt form (e.g., by reacting the free base group with a suitable organic acid). The degree of ionization in the salt may vary from completely ionized to almost non-ionized. Examples of pharmaceutically acceptable salts include, but are not limited to, mineral or organic acid salts of basic residues such as amines; alkali or organic salts of acidic residues such as carboxylic acids; and the like. Representative acid addition salts include acetate, adipate, alginate, ascorbate, aspartate, benzenesulfonate, benzoate, bisulfate, borate, butyrate, camphorate, camphorsulfonate, citrate, cyclopentanepropionate, digluconate, dodecylsulfate, ethanesulfonate, fumarate, glucoheptonate, glycerophosphate, hemisulfate, heptonate, hexanoate, hydrobromide, hydrochloride, hydroiodide, 2-hydroxy-ethanesulfonate, lactobionate, lactate, laurate, lauryl sulfate, malate, maleate, malonate, methanesulfonate, 2-naphthalenesulfonate, nicotinate, nitrate, oleate, oxalate, palmitate, pamoate, pectinate, persulfate, 3-phenylpropionate, phosphate, picrate, pivalate, propionate, stearate, succinate, sulfate, tartrate, thiocyanate, toluenesulfonate, undecanoate, valerate salts, and the like. Representative alkali or akaline earth metal salts include sodium, lithium, potassium, calcium, magnesium, and the like, as well as nontoxic ammonium, quaternary ammonium, and amine cations, including, but not limited to ammonium, tetramethylammonium, tetraethylammonium, methylamine, dimethylamine, trimethylamine, triethylamine, ethylamine, and the like. The pharmaceutically acceptable salts of the present disclosure include the conventional non-toxic salts of the parent compound formed, for example, in certain embodiments, from non-toxic inorganic or organic acids. The pharmaceutically acceptable salts of the present disclosure can be synthesized from the parent compound which contains a basic or acidic moiety by conventional chemical methods. Generally, such salts can be prepared by reacting the free acid or base forms of these compounds with a stoichiometric amount of the appropriate base or acid in water or in an organic solvent, or in a mixture of the two; generally, non-aqueous media like ether, ethyl acetate, ethanol, isopropanol, or acetonitrile are preferred. Lists of suitable salts are generally found in Remington's Pharmaceutical Sciences, 17th ed., Mack Publishing Company, Easton, Pa., 1985, p. 1418 and in Pharmaceutical Salts: Properties, Selection, and Use, P. H. Stahl and C. G. Wermuth (eds.), Wiley-VCH, 2008, each of which being incorporated herein by reference in its entirety. In one embodiment, the pharmaceutically acceptable salt is not a naturally occurring salt.

[0722] Pharmaceutically acceptable solvate: As used herein, unless indicated otherwise or contradictory in context, the term “pharmaceutically acceptable solvate,” refers to a compound, substance, association or combination wherein molecules of a suitable solvent are incorporated in the crystal lattice. A suitable solvent is physiologically tolerable at the dosage administered. For example, in certain embodiments, solvates may be prepared by crystallization, recrystallization, or precipitation from a solution that includes organic solvents, water, or a mixture thereof. Examples of suitable solvents are ethanol, water (For example, in certain embodiments, mono-, di-, and tri-hydrates), N-methylpyrrolidinone (NMP), dimethyl sulfoxide (DMSO), dimethylformamide (DMF), [Nu],[Nu]′-dimethylacetamide (DMAC), 1,3-dimethyl-2-imidazolidinone (DMEU), 1,3-dimethyl-3,4,5,6-tetrahydro-2-(1H)-pyrimidinone (DMPU), acetonitrile (ACN), propylene glycol, ethyl acetate, benzyl alcohol, 2-pyrrolidone, benzyl benzoate, and the like. When water is the solvent, the solvate is referred to as a “hydrate”. In one embodiment, the pharmaceutically acceptable solvate Is not a naturally occurring solvate.

[0723] Pharmaceutically acceptable Isotopically-labelled compounds: In one example, the present invention also includes all pharmaceutically acceptable isotopically-labelled derivatives, which are identical to the compounds, substances, combinations or associations described herein but wherein one or more atoms are replaced by atoms having an atomic mass or mass number different from the atomic mass or mass number usually found in nature. Examples of isotopes that may be incorporated into GFR-binding compound(s) as defined herein include isotopes of hydrogen, carbon, chlorine, fluorine, iodine, nitrogen, oxygen, and sulfur, such as ²H, ³H, ¹¹C, ¹³C, ¹⁴C, ³⁶Cl, ¹⁸F, ¹²³I, ¹³N, ¹⁵N, ¹⁷O, ¹⁸O, and ³⁵S, respectively. It should be understood that compounds, substances, combinations, associations, prodrugs, and pharmaceutical acceptable salts thereof described herein which contain the aforementioned isotopes and/or other isotopes of other atoms are within the scope of the invention. Certain isotopically labeled of the compounds, substances, combinations, associations, prodrugs, and salts thereof such as, for example, in certain embodiments, those incorporating a radioactive isotope such as ³H and ¹⁴C, are useful in drug and/or substrate tissue distribution studies. Tritium, i.e. ³H, and carbon-14, i.e. ¹⁴C, are particularly preferred due to their ease of preparation and detection. Further, substitution with heavier isotopes such as deuterium, i.e. ²H, can afford certain therapeutic advantages resulting from greater metabolic stability, for example, in certain embodiments, increased in vivo half-life or reduced dosage requirements, and hence may be preferred in some circumstances. Isotopically labeled compounds, substances, combinations, associations, prodrugs, and salts thereof can generally be prepared by carrying out the procedures disclosed in the Schemes and/or in the Examples by substituting a readily available non-isotopically labeled reagent for an isotopically labeled reagent.

[0724] Prodrugs: As used herein, unless indicated otherwise or contradictory in context, the term “prodrug” refers to a compound, substance, combination or association that is transformed in vivo to yield a compound, substance, combination or association as defined herein or a pharmaceutically acceptable salt or solvate thereof. The transformation may occur by various mechanisms, such as via hydrolysis in blood. A prodrug of a compound, substance, combination or association defined herein may be formed in a conventional manner with one or more functional groups in the compound, such as an amino, hydroxyl or carboxyl group. For example, in certain embodiments, if a compound defined herein contains a carboxylic acid functional group, a prodrug can comprise: (1) an ester formed by the replacement of a hydrogen of the acid group with a group such as (C1-C6)alkyl or (C6-C10) aryl; (2) an activated ester formed by the replacement of the hydrogen of the acid group with groups such as —(CR²)COOR′, where CR² is a spacer and R can be groups such as H or methyl and R′ can be groups such as (C1-C6)alkyl or (C6-C10) aryl; and/or (3) a carbonate formed by the replacement of the hydrogen of the acid with groups such as CHROCOOR′ where R can be groups such as H or methyl and R′ can be groups such as (C1-C6)alkyl or (C6-C10)aryl. Similarly, if a compound defined herein contains an alcohol functional group, a prodrug can be formed via the replacement of the hydrogen of the alcohol with groups such as (C1-C6)alkanoyloxymethyl or (C1-C6)akanoyloxyaryl or by forming an ester via condensation with, for example, in certain embodiments, an amino acid. Where a compound defined herein contains a primary or secondary amino group, a prodrug may comprise, for example, in certain embodiments, an amide formed by the replacement of one or both of the hydrogen atoms of the amino group with (C1-C10)alkanoyl or (C6-C10)aroyl. Other prodrugs of amines are well known to those skilled in the art. Alternatively, certain compounds defined herein may themselves act as prodrugs of other compounds defined herein. Discussions regarding prodrugs and their use can be found in, for example, in certain embodiments, “Prodrugs as Novel Delivery Systems,” T. Higuchi and W. Stella, Vol. 14 of the ACS Symposium Series, and Bioreversible Carriers in Drug Design, Pergamon Press, 1987 (ed. E B Roche, American Pharmaceutical Association). Examples of other prodrug types may be found in the aforementioned reference which is hereby incorporated by reference.

[0725] XI. Administration Routes and Procedures

[0726] (Modified) GFR-binding compounds, substances, functionalised bioactive carrier to be delivered and/or pharmaceutical, dermatological, prophylactic, diagnostic, or imaging compositions or formulations thereof in accordance with the present disclosure may be administered by any route of administration effective for preventing, treating, diagnosing, or imaging a disease, disorder, or condition and/or treating or alleviating at least one symptoms thereof and/or inducing tissue formation/regeneration and/or reducing or preventing tissue degeneration.

[0727] Suitable administration protocols include any in-vitro, in-vivo or ex-vivo administration protocol. The preferred types and routes of administration will be apparent to those of skill in the art, depending on the type of condition or disease to be prevented or treated or the nature of tissue to regenerate; whether the composition is nucleic acid based, protein based, cell based or combinations or mixtures thereof; and/or the target cell/tissue.

[0728] Ex-vivo and In-vitro administration: As used herein, unless indicated otherwise or contradictory in context, the term “ex-vivo administration” refers to performing the regulatory step outside of the subject/patient, such as administering a (modified) GFR-binding compounds, functionalised bioactive carrier or medical compositions as defined herein to a population of cells (e.g., mesenchymal stem cells) removed from a subject/patient for e.g. diagnostic, analysis and/or academic purposes.

[0729] Cells, tissues or organs can be contacted ex vivo or in vitro with a (modified) GFR-binding compound or a functionalised bioactive carrier by any suitable method, including mixing or the use of a delivery vehicle. Effective in vitro or ex vivo culture conditions include, but are not limited to, effective media, bioreactor, temperature, pH and oxygen conditions that permit cell culture. An effective medium refers to any medium in which a given host cell or tissue is typically cultured. Such medium typically comprises an aqueous medium having assimilable carbon, nitrogen and phosphate sources, and appropriate salts, minerals, metals and other nutrients, such as vitamins. Cells can be cultured in conventional fermentation bioreactors, shake flasks, test tubes, microtiter dishes, and petri plates. Culturing can be carried out at a temperature, pH and oxygen content appropriate for a cell or tissue. Such culturing conditions are within the expertise of one of ordinary skill in the art.

[0730] In one aspect, the present disclosure thus also provides a method for inducing tissue formation, in-vitro or ex-vivo, said method comprising the administration to a cell (e.g. a non-fully differentiated cell) of an effective amount of a GFR-binding compound, a functionalised bioactive carrier or a composition thereof as defined herein.

[0731] In-vivo administration: In one example, (modified) GFR-binding compounds, functionalised bioactive carriers or pharmaceutical, prophylactic, diagnostic, or imaging compositions are administered by one or more of a variety of routes, including oral, intravenous, intramuscular, intra-arterial, intramedullary, rectal, intravaginal, intrathecal, subcutaneous, intraventricular, transdermal, intradermal, intraperitoneal, topical (e.g. by ointments, creams, powders, lotions, gels, and/or drops), buccal, enteral, mucosal, nasal, vitreal, sublingual, by intra-tracheal instillation, bronchial instillation, and/or inhalation, as an oral spray, nasal spray, and/or aerosol, and/or through a portal vein catheter. In one example, (modified) GFR-binding compounds, functionalised bioactive carrier or pharmaceutical, prophylactic, diagnostic, or imaging compositions are administered by systemic intravenous injection. In one example, (modified) GFR-binding compounds, functionalised bioactive carrier or pharmaceutical, prophylactic, diagnostic, or imaging compositions may be administered in a way which allows them to cross the blood-brain barrier, vascular barrier, or other epithelial barrier.

[0732] Delivery: As used herein, unless indicated otherwise or contradictory in context, the term “delivery” refers to the act or manner of delivering a compound, substance, composition, entity, moiety, cargo or payload.

[0733] Delivery Agent: As used herein, unless indicated otherwise or contradictory in context, the term “delivery agent” refers to any substance which facilitates, at least in part, the in vivo delivery of a (modified) GFR-binding compounds, functionalised bioactive carriers or pharmaceutical, prophylactic, diagnostic, or imaging compositions defined herein to targeted cells.

[0734] Forms suitable for oral administration: A (modified) GFR-binding compound, functionalised bioactive carrier or pharmaceutical, prophylactic, diagnostic, or imaging compositions of the invention, for example, in certain embodiments, includes forms suitable for oral administration as a tablet, capsule, pill, powder, sustained release formulations, solution, suspension, or for parenteral injection as a sterile solution, suspension or emulsion. Pharmaceutical compositions suitable for the delivery of (modified) GFR-binding compounds, functionalised bioactive carrier or pharmaceutical, prophylactic, diagnostic, or imaging compositions defined herein and methods for their preparation will be readily apparent to those skilled in the art. Such compositions and methods for their preparation may be found, for example, in certain embodiments, in ‘Remington's Pharmaceutical Sciences’, 19th Edition (Mack Publishing Company, 1995), which is hereby incorporated by reference in its entirety. Oral administration may involve swallowing, so that the compounds or associations enters the gastrointestinal tract, or buccal or sublingual administration may be employed by which the compound enters the blood stream directly from the mouth. Formulations suitable for oral administration include solid formulations, such as tablets, capsules containing particulates, liquids, or powders; lozenges (including liquid-filled), chews; multi- and nano-particulates; gels, solid solution, liposome, films (including muco-adhesive), ovules, sprays and liquid formulations. Liquid formulations include suspensions, solutions, syrups and elixirs. Such formulations may be employed as fillers in soft or hard capsules and typically comprise a carrier, for example, in certain embodiments, water, ethanol, polyethylene glycol, propylene glycol, methylcellulose, or a suitable oil, and one or more emulsifying agents and/or suspending agents. Liquid formulations may also be prepared by the reconstitution of a solid, for example, in certain embodiments, from a sachet. The pharmaceutical associations or compositions defined herein may also be used in fast-dissolving, fast-disintegrating dosage forms such as those described in the art.

[0735] Forms suitable for parenteral administration: In one example, (modified) GFR-binding compounds, functionalised bioactive carriers or pharmaceutical, prophylactic, diagnostic, or imaging compositions of the invention may be administered by parenteral injection. Exemplary parenteral administration forms include sterile solutions, suspensions or emulsions of the pharmaceutical association defined herein in sterile aqueous media, for example, in certain embodiments, aqueous propylene glycol or dextrose. In another embodiment, the parenteral administration form is a solution. Such parenteral dosage forms can be suitably buffered, if desired. Preferred sterile solutions include sodium chloride, 0.9%, UPS solution. Injectable formulations can be sterilized, for example, in certain embodiments, by filtration through a bacterial-retaining filter, and/or by incorporating sterilizing agents in the form of sterile solid compositions which can be dissolved or dispersed in sterile water or other sterile injectable medium prior to use.

[0736] Forms suitable for rectal and vaginal administration: Compositions for rectal or vaginal administration are typically suppositories which can be prepared by mixing compositions with suitable non-irritating excipients such as cocoa butter, polyethylene glycol or a suppository wax which are solid at ambient temperature but liquid at body temperature and therefore melt in the rectum or vaginal cavity and release the active ingredient.

[0737] Forms suitable for topical and/or transdermal administration: Dosage forms for topical and/or transdermal administration of a composition may include ointments, pastes, creams, lotions, gels, powders, solutions, sprays, inhalants and/or patches. Generally, an active ingredient is admixed under sterile conditions with a pharmaceutically acceptable excipient and/or any needed preservatives and/or buffers as may be required.

[0738] Forms suitable for pulmonary administration: Dosage forms for pulmonary administration via the buccal cavity may comprise dry particles which comprise the active ingredient (e.g. the pharmaceutical association defined herein) and which have a diameter in the range from about 0.5 nm to about 7 nm. Such compositions are conveniently in the form of dry powders for administration using a device comprising a dry powder reservoir to which a stream of propellant may be directed to disperse the powder and/or using a self-propelling solvent/powder dispensing container such as a device comprising the active ingredient dissolved and/or suspended in a low-boiling propellant in a sealed container. Pharmaceutical compositions formulated for pulmonary delivery may provide an active ingredient in the form of droplets of a solution and/or suspension. Such formulations may be prepared, packaged, and/or sold as aqueous and/or dilute alcoholic solutions and/or suspensions, optionally sterile, comprising active ingredient, and may conveniently be administered using any nebulization and/or atomization device. Such formulations may further comprise one or more additional ingredients including, but not limited to, a flavoring agent such as saccharin sodium, a volatile oil, a buffering agent, a surface active agent, and/or a preservative such as methylhydroxybenzoate.

[0739] Forms suitable for nasal administration: Formulations described herein as being useful for pulmonary delivery are also useful for intranasal delivery of a pharmaceutical composition. Formulations suitable for nasal administration may, for example, in certain embodiments, comprise from about as little as 0.1% (w/w) and as much as 100% (w/w) of active ingredient (e.g. the pharmaceutical association defined herein), and may comprise one or more of the additional ingredients described herein. A pharmaceutical composition may be prepared, packaged, and/or sold in a formulation suitable for buccal administration. Such formulations may, for example, in certain embodiments, be in the form of tablets and/or lozenges made using conventional methods, and may, for example, in certain embodiments, 0.1% to 20% (w/w) active ingredient, the balance comprising an orally dissolvable and/or degradable composition and, optionally, one or more of the additional ingredients described herein. Alternately, formulations suitable for buccal administration may comprise a powder and/or an aerosolized and/or atomized solution and/or suspension comprising active ingredient. Such powdered, aerosolized, and/or aerosolized formulations, when dispersed, may have an average particle and/or droplet size in the range from about 0.1 nm to about 200 nm, and may further comprise one or more of any additional ingredients described herein.

[0740] Forms suitable for ophthalmic administration: Dosage forms for ophthalmic administration include, for example, in certain embodiments, eye drops including, for example, in certain embodiments, a 0.1/1.0% (w/w) solution and/or suspension of the active ingredient (e.g. the pharmaceutical association defined herein) in an aqueous or oily liquid excipient. Such drops may further comprise buffering agents, salts, and/or one or more other of any additional ingredients described herein. Other ophthalmically-administrable formulations which are useful include those which comprise the active ingredient in microcrystalline form and/or in a liposomal preparation. Ear drops and/or eye drops are contemplated as being within the scope of this present disclosure.

[0741] Direct Injection: One preferred administration method for delivering (modified) GFR-binding compounds, functionalised bioactive carriers or pharmaceutical, prophylactic, diagnostic, or imaging compositions as defined herein is by local administration, in particular, by direct injection. Direct injection techniques are particularly useful for administering a composition to a cell or tissue that is accessible by surgery, and particularly, on or near the surface of the body. Administration of a composition locally within the area of a target cell refers to injecting the composition centimeters and preferably, millimeters from the target cell or tissue.

[0742] Dosage regimens: The dosage regimen of the (modified) GFR-binding compounds, functionalised bioactive carriers or pharmaceutical, prophylactic, diagnostic, or imaging compositions as defined herein may be adjusted to provide the optimum desired response. For example, in certain embodiments, a single bolus may be administered, several divided doses may be administered over time or the dose may be proportionally reduced or increased as indicated by the exigencies of the therapeutic situation. The appropriate dosing regimen, the amount of each dose administered and/or the intervals between doses will depend upon the pharmaceutical association being used, the type of pharmaceutical composition, the characteristics of the subject in need of treatment and the severity of the condition being treated. Thus, the skilled artisan would appreciate, based upon the disclosure provided herein, that the dose and dosing regimen is adjusted in accordance with methods well-known in the therapeutic arts. That is, the maximum tolerable dose can be readily established, and the effective amount providing a detectable therapeutic benefit to a patient may also be determined, as can the temporal requirements for administering each agent to provide a detectable therapeutic benefit to the patient. Accordingly, while certain dose and administration regimens are exemplified herein, these examples in no way limit the dose and administration regimen that may be provided to a patient in practicing the present invention. In general, pharmaceutical compositions in accordance with the present disclosure may be administered at dosage levels sufficient to deliver from about 0.0001 mg/kg to about 100 mg/kg, from about 0.01 mg/kg to about 50 mg/kg, from about 0.1 mg/kg to about 40 mg/kg, from about 0.5 mg/kg to about 30 mg/kg, from about 0.01 mg/kg to about 10 mg/kg, from about 0.1 mg/kg to about 10 mg/kg, or from about 1 mg/kg to about 25 mg/kg, of subject body weight per day, one or more times a day, to obtain the desired therapeutic, diagnostic, prophylactic, or imaging effect. The desired dosage may be delivered three times a day, two times a day, once a day, every other day, every third day, every week, every two weeks, every three weeks, or every four weeks. In certain embodiments, the desired dosage may be delivered using multiple administrations (e.g., two, three, four, five, six, seven, eight, nine, ten, eleven, twelve, thirteen, fourteen, or more administrations). It is to be further understood that for any particular subject, specific dosage regimens should be adjusted over time according to the individual need and the professional judgment of the person administering or supervising the administration of the compositions, and that dosage ranges set forth herein are exemplary only and are not intended to limit the scope or practice of the present invention. For example, in certain embodiments, doses may be adjusted based on pharmacokinetic or pharmacodynamic parameters, which may include clinical effects such as toxic effects and/or laboratory values. Thus, the present invention encompasses intra-patient dose-escalation as determined by the skilled artisan. Determining appropriate dosages and regiments for administration of the chemotherapeutic agent are well-known in the relevant art and would be understood to be encompassed by the skilled artisan once provided the teachings disclosed herein.

[0743] Effective dose parameters: The dosage regimen of the (modified) GFR-binding compounds or functionalised bioactive carriers and/or pharmaceutical compositions as defined herein may be adjusted to obtain effective dose parameters. Effective dose parameters can be determined using methods standard in the art for a particular disease or condition. In particular, the effectiveness of dose parameters of a therapeutic composition as defined herein can be determined by assessing response rates. Such response rates refer to the percentage of treated patients in a population of patients that respond with either partial or complete remission.

[0744] A pharmaceutical composition as defined herein may be prepared, packaged, or sold in bulk, as a single unit dose, or as a plurality of single unit doses.

[0745] Unit dose: As used herein, unless indicated otherwise or contradictory in context, the term “unit dose” refers to a discrete amount of the pharmaceutical composition comprising a predetermined amount of the active ingredient. The amount of the active ingredient is generally equal to the dosage of the active ingredient which would be administered to a subject or a convenient fraction of such a dosage such as, for example, in certain embodiments, one-half or one-third of such a dosage.

[0746] Single unit dose: As used herein, unless indicated otherwise or contradictory in context, the term “single unit dose” refers to a dose of any therapeutic association or composition administered in one dose/at one time/single route/single point of contact, i.e., single administration event.

[0747] Split dose: As used herein, unless indicated otherwise or contradictory in context, the term “split dose” refers to the division of single unit dose or total daily dose into two or more doses.

[0748] Total dally dose: As used herein, unless indicated otherwise or contradictory in context, the term “total daily dose” refers to an amount given or prescribed in 24 hr period. It may be administered as a single unit dose.

[0749] The relative amounts of the active ingredient(s), the pharmaceutically acceptable excipients, carriers or vehicles, and any additional ingredients in a pharmaceutical composition defined herein will vary, depending upon the identity, size, and condition of the subject treated and further depending upon the route by which the composition is to be administered. In addition to the active ingredient, a pharmaceutical composition of the invention may further comprise one or more additional pharmaceutically active agents.

[0750] Combination therapy: Compounds, associations, compositions or formulations defined herein may be used in combination with one or more other therapeutic, prophylactic, diagnostic, or imaging agents. As used herein, the term “in combination with” is not intended to imply that the agents must be administered at the same time and/or formulated for delivery together, although these methods of delivery are within the scope of the present disclosure. Compositions can be administered concurrently with, prior to, or subsequent to, one or more other desired therapeutics or medical procedures. In some embodiments, they are administered within about 90, 60, 30, 15, 10, 5, or 1 minute of one another. In some embodiments, the administrations of the agents are spaced sufficiently closely together such that a combinatorial (e.g., a synergistic) effect is achieved. In general, each agent will be administered at a dose and/or on a time schedule determined for that agent. In one example, the present disclosure encompasses the delivery of pharmaceutical, prophylactic, diagnostic, or imaging compositions in combination with agents that improve their bioavailability, reduce and/or modify their metabolism, inhibit their excretion, and/or modify their distribution within the body. It will further be appreciated that therapeutically, prophylactically, diagnostically, or imaging active agents used in combination may be administered together in a single composition or administered separately in different compositions. In general, it is expected that agents used in combination with be used at levels that do not exceed the levels at which they are used individually. In one example, the levels used in combination will be lower than those utilized individually. The particular combination of therapies to employ in a combination regimen will take into account compatibility of the desired therapeutics and/or procedures and the desired therapeutic effect to be achieved. It will also be appreciated that the therapies employed may achieve a desired effect for the same disorder, or they may achieve different effects (e.g., control of any adverse effects).

[0751] Although the descriptions of pharmaceutical compositions provided herein are principally directed to pharmaceutical compositions which are suitable for administration to mammals, in particular humans, it will be understood by the skilled artisan that such compositions are generally suitable for administration to animals of all sorts, in particular to any member of the Vertebrate class. Modification of pharmaceutical compositions suitable for administration to humans in order to render the compositions suitable for administration to various animals is well understood, and the ordinarily skilled veterinary pharmacologist can design and/or perform such modification with merely ordinary, if any, experimentation. Subjects to which administration of the pharmaceutical compositions is contemplated include, but are not limited to, humans and/or other primates; mammals, including commercially relevant mammals such as cattle, pigs, horses, sheep, cats, dogs, mice, and/or rats; and/or birds, including commercially relevant birds such as chickens, ducks, geese, and/or turkeys.

[0752] XIII. Dermatological Applications

[0753] When the cell or tissue to be regenerated, repaired or treated is a skin cell or tissue (mainly from the fibroblast lineage), the pharmaceutical composition defined herein may be a dermatological composition comprising at least one (modified) GFR-binding compound or at least one functionalised bioactive carrier, as all defined herein, and at least one dermatologically acceptable excipient.

[0754] For example, in certain embodiments, a dermatological composition for the uses of the invention may contain between 0.01% and 100% by weight (over the total weight of the dermatological composition) of a GFR-binding compound or functionalised bioactive carrier, both as defined herein, as a dermatological effective amount. The dermatological composition particularly comprises between 0.01% and 95%, between 0.01% and 90%, between 0.01% and 85%, between 0.01% and 80%, between 0.01% and 75%, between 0.01% and 70%, between 0.01% and 65%, between 0.01% and 60%, between 0.01% and 55%, between 0.01% and 50%, between 0.01% and 45%, between 0.01% and 40%, between 0.01% and 35%, between 0.01% and 30%, between 0.01% and 25%, between 0.01% and 20%, between 0.01% and 15%, between 0.01% and 10%, between 0.01% and 5%, between 0.1% and 100%, between 0.1% and 95%, between 0.1% and 90%, between 0.1% and 85%, between 0.1% and 80%, between 0.1% and 75%, between 0.1% and 70%, between 0.1% and 65%, between 0.1% and 60%, between 0.1% and 55%, between 0.1% and 50%, between 0.1% and 45%, between 0.1% and 40%, between 0.1% and 35%, between 0.1% and 30%, between 0.1% and 25%, between 0.1% and 20%, between 0.1% and 15%, between 0.1% and 10%, and between 0.1% and 5% by weight (over the total weight of the dermatological composition) of any one of a GFR-binding compound or a functionalised bioactive carrier.

[0755] Dermatologically acceptable: As used herein, unless indicated otherwise or contradictory in context, the term “dermatologically acceptable” means that the compound(s) or pharmaceutical association(s) used are adapted for use in contact with human skin without undue toxicity, incompatibility, instability, allergic response, or their equivalents.

[0756] Dermatological formulations: Suitable formulation for implementing dermatological embodiments of the invention include an aqueous or oil-based solution, a water-based cream or gel or an oily gel, usually in a jar or a tube, particularly a shower gel, shampoo, milk, emulsion, microemulsion or nanoemulsion, particularly oil-in-water or water-in-oil or multiple of silicone-based; a lotion, particularly in a glass or plastic bottle of a spray or aerosol bottle, a blister-pack, liquid soap, a dermatological bar of soap, a pomade, mousse, an anhydrous product, preferably liquid, cream or solid, for example in the form of a stick, particularly in the form of lipstick, a cataplasm or a patch.

[0757] Preferred administration routes include, but are not limited to, oral, topical or intradermal as already defined herein.

[0758] Dermatologically acceptable excipients: Suitable dermatologically acceptable excipients for implementing embodiments of the invention include, but are not limited to, preservatives, emollients, emulsifiers, surfactants, moisturizers, thickeners, conditioners, mattifying agents, stabilizers, antioxidants, texturizing agents, shine agents, filmogenic agents, solubilizers, pigments, colorants, perfumes, and solar filters. These excipients are preferably chosen from among the group consisting of amino acids and their derivatives, polyglycerols, esters, polymers and cellulose derivatives, lanoline derivatives, phospholipids, lactoferrins, lactoperoxidases, sucrose-based stabilizers, vitamin E and its derivatives, natural and synthetic waxes, vegetable oils, triglycerides, insaponifiables, phytosterols, plant esters, silicones and their derivatives, protein hydrolysates, jojoba oil and its derivatives, lipo/hydrosoluble esters, betaines, aminoxides, saccharose ester plant extracts, titanium dioxides, glycines, parabens, and even more preferably from among the group consisting of butylene glycol, glycol-15 stearyl ether, cetearyl alcohol, phenoxyethanol, methylparaben, propylparaben, butylparaben, butylenes glycol, natural tocopherols, glycerine, dihydroxycetyl sodium phosphate, isopropyl hydroxycetyl ether, le glycol stearate, triisononanoin, octyl cocoate, polyacrylamide, isoparaffin, laureth-7, carbomer, propylene glycol, glycerol, bisabolol, dimethicone, sodium hydroxide, PEG 30-dipolyhydroxysterate, capric/caprylic triglycerides, cetearyl octanoate, dibutyl adipate, grapeseed oil, jojoba oil, magnesium sulfate, EDTA, cyclomethicone, xanthan gum, citric acid, sodium lauryl sulfate, mineral waxes and oils, isostearyl isostearate, dipelargonate of propylene glycol, isostearate of propylene glycol, PEG 8, beeswax, glyceride of hydrogenated palm kernel oil, lanolin oil, sesame oil, cetyl lactate, lanolin alcohol, titanium dioxide, lactose, saccharose, low-density polyethylene, and isotonic salt solution.

[0759] In one example, the dermatological composition as defined herein may contain at least one other active agents and/or excipients and/or additives of pharmaceutical, especially dermatological, interest such as agents with the following properties:
[0760] wound-healing properties; such as panthenol and derivatives thereof, for example ethyl panthenol, aloe vera, pantothenic acid and derivatives thereof, allantoin, bisabolol, and dipotassium glycyrrhizinate;
[0761] anti-inflammatory properties: such as steroidal and non-steroidal antiinflammatories, in particular Inhibitors of the production of cytokines and chemokines, of cyclooxygenase, of nitric oxide (NO) and nitric oxide synthase (NOS). As an example of anti-inflammatory products, mention may be made of extracts of Ginkgo biloba, trilactone terpenes such as ginkgolides, especially ginkgolide B and bilobalide known for their platelet-activating factor (PAF) antagonist properties.

[0762] The CTFA Cosmetic Ingredient Handbook, Second Edition (1992), which is hereby incorporated by reference in its entirety, describes different cosmetic and pharmaceutical ingredients currently used in the cosmetic and pharmaceutical industry that are particularly adapted to topical use and which may be used in a dermatological composition of the invention. Examples of these types of ingredients include but are not limited to the following compounds: abrasives, absorbent compounds, compounds with aesthetic purposes such as perfumes, pigments, colorants, essential oils, astringents, etc. (for example: clove oil, menthol, camphor, eucalyptus oil, eugenol, menthyl lactate, and hamelis distillate), anti-acne agents, anti-flocculant agents, anti-foaming agents, anti-microbial agents (for example iodopropyl butylcarbamate), les antioxidants, bonding agents, biological additives, tampon agents, swelling agents, chelatants, additives, biocidal agents, denaturants, external analgesics, film-forming materials, polymers, opacifying agents, pH adjusters, reducing agents, depigmenting or lightening agents (for example: hydroquinone, kojic acid, ascorbic acid, magnesium ascorbyl phosphate, ascorbyl glucosamine), conditioning agents (for example: humectants), calming agents for the skin and/or scarring agents (for example: panthenol and its derivatives, for example ethyl panthenol), aloe vera, pantothenic acid and its derivatives, allantoin, bisabolol and dipotassium glycyrrhizinate), thickeners, vitamins, and the derivatives or equivalents of these.

[0763] In one aspect, the present disclosure provides a (modified) GFR-binding compound, a functionalised bioactive carrier, or a dermatological composition, all as defined herein, for use in preventing and/or treating scars and/or inflammations such as gingivitis.

[0764] In one particular example, the dermatological composition is intended for treating skin in which the dermis is at least partially damaged, especially in subjects who have undergone a surgical operation, or who have been burned and/or injured. This treatment makes it possible to stimulate the proliferation and/or the activity of fibroblasts, in order to stimulate tissue repair and/or dermal reconstruction.

[0765] In one aspect, the present disclosure provides a (modified) GFR-binding compound, a functionalised bioactive carrier, or a dermatological composition, all as defined herein, for use in preventing and/or treating at least one of acne, alopecia areata, bowen's disease, congenital erythropoietic porphyria, contact dermatitis, darier's disease, eczema (atopic eczema), epidermolysis bullosa simplex, erythropoietic protoporphyria, fungal infections of nails, hailey-hailey disease, herpes simplex, hidradenitis suppurativa, hirsutism, hyperhidrosis, ichthyosis, impetigo, keloids, keratosis pilaris, lichen planus, lichen sclerosus, melasma, pemphigus vulgaris, plantar warts (verrucas), pityriasis lichenoides, polymorphic light eruption, psoriasis, pyoderma gangrenosum, rosacea, scabies, shingles and vitiligo.

[0766] In one aspect, the present disclosure also provides a dermatological care or treatment method for a subject having need thereof, said method comprising the topical application, intradermal injection or oral administration, preferably the topical application or the intradermal injection, of a (suitable amount of) at least one (modified) GFR-binding compound, functionalised bioactive carrier, or dermatological composition, all as defined herein.

[0767] Such a dermatological care or treatment method includes the applications cited herein.

[0768] Suitable as amounts of (modified) GFR-binding compounds or functionalised bioactive carrier for implementing embodiments of the invention in the dermatological field include the group consisting of between about 0.0001 μg/day to about 5000 mg/day, between about 0.0001 μg/day to about 1000 mg/day, between about 0.0001 μg/day to about 10 mg/day, between about 0.0001 μg/day to about 1 mg/day, or between about 0.0001 μg/day to about 100 μg/day, all being preferred for implementing embodiments of the invention.

[0769] Advantageously, the subject who has need thereof is a subject chosen from a population having an average age of more than 30 years old or who has had sunlight over-exposure, has a family history of skin conditions.

[0770] XIV. Ophthalmic Applications

[0771] Preferable dosage forms for the (modified) GFR-binding compound functionalised bioactive carrier or pharmaceutical composition, all as defined herein, for treating eye retina diseases, disorders or conditions include, for example, in certain embodiments, eye drops and eye ointments. These can be prepared using conventional techniques. For instance, eye drops may be prepared, using isotonic agents such as sodium chloride, buffers such as sodium phosphate, and preservatives such as benzalkonium chloride. A suitable pH is within an ophthalmologically acceptable range. Preferred pH is within pH 4 to 8.

[0772] Particularly preferred administration routes include vitreal and intraocular.

[0773] A suitable dose of (modified) GFR-binding compound, functionalised bioactive carrier, or pharmaceutical composition for treating eye disorders is appropriately selected, depending on the symptoms, age of patients, dosage form and the like. For eye drops, suitable concentration may be 0.0001 to 10 w/v %, preferably 0.0001 to 0.01 w/v % for administration into eyes once or several times a day.

[0774] XV. Surgical Treatments

[0775] The (modified) GFR-binding compounds, functionalised bioactive carriers, and pharmaceutical compositions, all as defined herein, may be used in surgical methods suitable for protecting (e.g. treating or preventing) a patient or subject from a disease, condition, disorder or pathology to whom a surgical intervention would be beneficial.

[0776] For example, in certain embodiments, said surgical method may be selected from the group consisting of bone-repair surgery, cartilage-repair surgery, heart surgery, kidneys or lung surgery, eye surgery, muscle-repair surgery, and tendon/ligament—repair surgery.

[0777] In one aspect, the present invention thus discloses a surgical method for surgical treatment comprising the contacting of at least one (modified) GFR-binding compound, at least one functionalised bioactive carrier, a pharmaceutical, prophylactic, diagnostic or imaging composition thereof, or medical device, all as defined herein, with a body part of a patient to be treated, wherein said contacting induces stem cell differentiation and tissue formation.

[0778] In one example, said surgical method comprises the placement or implantation of an implantable medical device comprising a (modified) GFR-binding compound, a functionalised bioactive carrier, or a pharmaceutical, prophylactic, diagnostic or imaging composition thereof, all as defined herein, inside a patient or subject in need of such a surgical treatment.

[0779] For example, in certain embodiments, the surgical treatment of the invention may include the use of a placement, insertion or depositing device for contacting said GFR-binding compound, said functionalised bioactive carrier, or a pharmaceutical, prophylactic, diagnostic or imaging composition thereof with a body part of a patient or subject in need of such a treatment. In one example, said placement, insertion or depositing device comprises an injection device such as a syringe.

[0780] In certain embodiments, said surgical method comprises the positioning of a GFR-binding compound, a functionalised bioactive carrier, or a pharmaceutical, prophylactic, diagnostic or imaging composition thereof, all as defined herein, inside said injection device for injection into a patient or into a body part of a patient.

[0781] In one example, said medical device comprises titanium and/or PEEK and/or PET and/or hydrogel and/or ceramic. In one particular example, said medical device replaces part of or all of a body part of a patient or subject. In one example, said body part is a malfunctioning or damaged body part such as, for instance, a bone, the skin, the hair scalp, an eye, etc.

[0782] XVI. Pharmaceutical Applications, Uses and Methods

[0783] Some growth factors interact with type I and II growth factor receptors belonging to the serine threonine kinase family. Conventionally, to mediate signaling pathways, growth factors interact with these receptors by forming specific dimeric or oligomeric structures. The type-II receptor, which is constitutively active, phosphorylates the type-I receptor, which then activates the transduction pathway Smad1/5/8. Receptors of both types are thus conventionally needed to form a functional complex in order to initiate further signaling events. Phosphorylated Smads then dissociate from the receptors and bind Smad4, a common mediator, leading to nuclear translocation, regulation of specific genes, and eventually may induce tissue regeneration.

[0784] Prior in-vitro and in-vivo scientific studies have reported that influencing the natural/conventional biology of human mesenchymal stem cells using exogenous entity or molecules such as recombinant growth factor proteins or peptide fragments thereof, may have an effect on cell differentiation and tissue regeneration. A (modified) GFR-binding compound or a functionalised bioactive carrier of the present disclosure may be one such exogenous entity or molecule.

[0785] For example, in certain embodiments, medical treatments may demonstrate the effect of the influence of an exogenous entity or molecule on human mesenchymal stem cells using a medical device onto or into which such an exogenous entity or molecule has been reversibly or irreversibly incorporated or deposited, both being equally preferred, and placed into a patient in need thereof.

[0786] In one example, medical treatments may provide the effect of the influence of an exogenous entity or molecule on human mesenchymal stem cells using a pharmaceutical composition containing such an exogenous entity or molecule and a pharmaceutically acceptable excipient or carrier, administered, for instance, orally, enterically, intravenously, peritoneally, subcutaneously, transdermally, parenterally, or rectally, to a patient in need of such a treatment.

[0787] As already stated herein, for in-vivo administration, compounds or compositions of the present invention may be injected at a target site so that they can be delivered in close proximity to the cells to be treated via, e.g. a PTD or cell-permeable peptide. Alternately, an implant (or medical device or implantable medical device) comprising a PTD/GFR-binding compound complex may be used.

[0788] The present invention generally provides for uses and methods of inducing mesenchymal stem cell or progenitor cell (at any stage of differentiation) differentiation and/or inducing, promoting, enhancing, controlling or regulating tissue regeneration/formation in-vitro, ex-vivo and in-vivo.

[0789] Conveniently, such a tissue formation process is generally achieved within less than 7 days. In particular, such a tissue formation process is generally achieved within less than 6 days. In particular, such a tissue formation process is generally achieved within less than 5 days. In particular, such a tissue formation process is generally achieved within less than 4 days. In particular, such a tissue formation process is generally achieved within less than 3 days. In particular, such a tissue formation process is generally achieved within less than 2 days. In particular, such a tissue formation process is generally achieved within less than 24 hours. In particular, such a tissue formation process is generally achieved within less than 18 hours.

[0790] In one aspect, the present disclosure provides a pharmaceutical (therapeutic, dermatologic, ophthalmologic, diagnostic, etc.) composition as defined herein for use in a method of non-mutagenically inducing tissue formation i.e. without modifying or altering the genome of the treated cells, in-vitro, ex-vivo or in-vivo. Also provided is a method of inducing tissue formation i.e. without modifying or altering the genome of the treated cells, comprising the in-vitro, ex-vivo or in-vivo administration of an effective amount of a (modified) GFR-binding compound, a functionalised bioactive carrier, or a pharmaceutical (therapeutic, dermatologic, ophthalmologic, diagnostic, etc.) composition as defined herein.

[0791] In one aspect, the present disclosure provides a pharmaceutical (therapeutic, dermatologic, ophthalmologic, diagnostic, etc.) composition as defined herein for use in a method of extracellular induction of tissue formation. Also provided is a method of extracellular tissue formation induction, comprising the in-vitro, ex-vivo or in-vivo administration of an effective amount of a (modified) GFR-binding compound, a functionalised bioactive carrier, or a pharmaceutical (therapeutic, dermatologic, ophthalmologic, diagnostic, etc.) composition as defined herein.

[0792] An extracellular treatment as used herein implies a biological action/effect to be provided or to occur outside the cell to be treated (i.e. a mesenchymal stem cell). In other words, the biologically active agent (e.g. the GFR-binding compound or the pharmaceutical composition as defined herein) delivers/provides its biological/pharmaceutical effect to the outside of the cell (e.g. on the cell's surface) without the need to penetrate through the cell membrane, inside the cell to be treated. Once the extracellular action/effect has been administered/delivered to the cell to be treated, said active agent may be, for instance, excreted from the host organism with or without being metabolised, and/or tagged to be destroyed through apoptotic routes, and/or internalised by nearby cells, etc. . . . .

[0793] In one aspect, the present disclosure provides a method of producing a physiologically functional and healthy cell, comprising the administration in-vitro, ex-vivo or in-vivo to a mesenchymal stem cell or progenitor cell (at any stage of differentiation) of an effective amount of a (modified) GFR-binding compound, a functionalised bioactive carrier, or a pharmaceutical (therapeutic, dermatologic, ophthalmologic, diagnostic, etc.) composition as defined herein and wherein said physiologically functional and healthy cell is selected from the group consisting of an osteoblast, osteocyte, chondroblast, chondrocyte, neuroblast, neurocyte, Sertoli cells, Leydig cell, Germ cell, Myoblast, Myocyte, keratinocyte, endothelial cells, angioblast, fibroblast, fibrocyte, podocyte, areolar connective cells, adipocytes, pre-adipocytes/lipoblasts, epithelial cells, erythrocytes, alveolar cells, hematopoietic stem cells (HSC), myeloid progenitors, lymphoid progenitors, mast cells, myeloblasts, monocytes, macrophages, neutrophils, basophils, eosinophils, erythrocytes, megakaryocytes, thrombocytes, dendritic cells, small lymphocytes, T-lymphocytes (T-cells), B-lymphocytes (B-cells), and natural killer (NK)-cells.

[0794] In one aspect, the present disclosure provides methods to activate a growth factor receptor present on the surface of a mesenchymal stem cell or progenitor cell (at any stage of differentiation), said method comprising administering to said mesenchymal stem cell or progenitor cell (at any stage of differentiation) an effective amount of a (modified) GFR-binding compound, a functionalised bioactive carrier, or a pharmaceutical (therapeutic, dermatologic, ophthalmologic, diagnostic, etc.) composition as defined herein, wherein administering said GFR-binding compound, a functionalised bioactive carrier, or a pharmaceutical (therapeutic, dermatologic, ophthalmologic, diagnostic, etc.) composition as defined herein activates the growth factor receptor present on the surface of the mesenchymal stem cell or progenitor cell (at any stage of differentiation).

[0795] In one aspect, the present disclosure provides methods of delivering a (modified) GFR-binding compound, a functionalised bioactive carrier, or a pharmaceutical (therapeutic, dermatologic, ophthalmologic, diagnostic, etc.) composition, all as defined herein, in-vitro, ex-vivo or in-vivo to a mesenchymal stem cell or progenitor cell (at any stage of differentiation), comprising the contacting of said mesenchymal stem cell or progenitor cell (at any stage of differentiation) with said (modified) GFR-binding compound, a functionalised bioactive carrier, or a pharmaceutical (therapeutic, dermatologic, ophthalmologic, diagnostic, etc.) composition.

[0796] In one aspect, the present disclosure provides methods of administering a (modified) GFR-binding compound, a functionalised bioactive carrier, or a pharmaceutical (therapeutic, dermatologic, ophthalmologic, diagnostic, etc.) composition, all as defined herein, to a patient or subject comprising the contacting of at least one body part of said patient or subject with said (modified) GFR-binding compound, a functionalised bioactive carrier, or a pharmaceutical (therapeutic, dermatologic, ophthalmologic, diagnostic, etc.) composition.

[0797] In one example, the (modified) GFR-binding compound, functionalised bioactive carrier, or pharmaceutical (therapeutic, dermatologic, ophthalmologic, diagnostic, etc.) composition, all as defined herein, may be a mammal (preferably a human) tissue-inductive compound, bioactive carrier or composition, which has demonstrated the ability to induce tissue formation in vitro and/or in vivo.

[0798] In one aspect, the present disclosure provides an effective amount of at least one (modified) GFR-binding compound, at least one functionalised bioactive carrier, or at least one pharmaceutical (therapeutic, dermatologic, ophthalmologic, diagnostic, etc.) composition, all as defined herein, for use in a medical method such as in therapy, surgery or in diagnostic methods.

[0799] In one aspect, the present disclosure provides a method of inducing or promoting or enhancing mesenchymal stem cell or progenitor cell (at any stage of differentiation) differentiation, the method comprising administering to the cell an effective amount of at least one (modified) GFR-binding compound, at least one functionalised bioactive carrier, or at least one pharmaceutical (therapeutic, dermatologic, ophthalmologic, diagnostic, etc.) composition, all as defined herein. In one aspect, the present invention discloses an effective amount of at least one (modified) GFR-binding compound, at least one functionalised bioactive carrier, or at least one pharmaceutical (therapeutic, dermatologic, ophthalmologic, diagnostic, etc.) composition, all as defined herein, for use in a method of inducing or promoting or enhancing mesenchymal stem cell or progenitor cell (at any stage of differentiation) differentiation

[0800] In one aspect, the present disclosure provides a method of inducing or promoting or enhancing or controlling or regulating tissue regeneration/formation, the method comprising administering to a mesenchymal stem cell or to a progenitor cell at any stage of differentiation or to a mature cell an effective amount of at least one (modified) GFR-binding compound, at least one functionalised bioactive carrier, or at least one pharmaceutical (therapeutic, dermatologic, ophthalmologic, diagnostic, etc.) composition, all as defined herein. In one aspect, the present invention discloses an effective amount of at least one (modified) GFR-binding compound, at least one functionalised bioactive carrier, or at least one pharmaceutical (therapeutic, dermatologic, ophthalmologic, diagnostic, etc.) composition, all as defined herein, for use in a method of inducing or promoting or enhancing or controlling or regulating tissue regeneration/formation.

[0801] In one aspect, the present disclosure provides a method of inducing and/or promoting and/or enhancing cell motility or single/collective cell migration, the method comprising administering to a mesenchymal stem cell or to a progenitor cell at any stage of differentiation or to a mature cell an effective amount of at least one (modified) GFR-binding compound, at least one functionalised bioactive carrier, or at least one pharmaceutical (therapeutic, dermatologic, ophthalmologic, diagnostic, etc.) composition, all as defined herein. In one aspect, the present invention discloses an effective amount of at least one (modified) GFR-binding compound, at least one functionalised bioactive carrier, or at least one pharmaceutical (therapeutic, dermatologic, ophthalmologic, diagnostic, etc.) composition, all as defined herein, for use in a method of inducing and/or promoting and/or enhancing cell motility or single/collective cell migration.

[0802] In one aspect, the present invention discloses a method of inducing and/or promoting and/or enhancing cell maturation, the method comprising administering to a differentiated cell or to a mature cell an effective amount of at least one (modified) GFR-binding compound, at least one functionalised bioactive carrier, or at least one pharmaceutical (therapeutic, dermatologic, ophthalmologic, diagnostic, etc.) composition, all as defined herein. In one aspect, the present invention discloses an effective amount of at least one (modified) GFR-binding compound, at least one functionalised bioactive carrier, or at least one pharmaceutical (therapeutic, dermatologic, ophthalmologic, diagnostic, etc.) composition, all as defined herein, for use in a method of inducing and/or promoting and/or enhancing cell maturation.

[0803] In one example, the (modified) GFR-binding compound, functionalised bioactive carrier, or pharmaceutical (therapeutic, dermatologic, ophthalmologic, diagnostic, etc.) composition, all as defined herein, may be combined/mixed with adult stem cells and/or multipotent progenitor cells prior to be administered or implanted into a mammal (preferably a human) to promote tissue regeneration.

[0804] In one example, the (modified) GFR-binding compound, functionalised bioactive carrier, or pharmaceutical (therapeutic, dermatologic, ophthalmologic, diagnostic, etc.) composition, all as defined herein, may be administered as such and may be combined/mixed with adult stem cells and/or multipotent progenitor cells prior to administration to a mammal (preferably a human) to promote tissue regeneration.

[0805] In particular, medical applications which may result from the mediation of type I and II growth factor receptors by a (modified) GFR-binding compound, functionalised bioactive carrier, or pharmaceutical (therapeutic, dermatologic, ophthalmologic, diagnostic, etc.) composition, all as defined herein, include, but are not limited to, enhancing of osteogenesis, inducing bone formation, inducing osteocyte maturation, and/or treating and/or preventing osteoporosis.

[0806] In one example, a (modified) GFR-binding compound, functionalised bioactive carrier, or pharmaceutical (therapeutic, dermatologic, ophthalmologic, diagnostic, etc.) composition, all as defined herein, may thus be an osteoinductive compound, bioactive carrier or composition which has demonstrated an ability to induce bone formation in vitro and/or ex-vivo and/or in vivo.

[0807] In one aspect, the present disclosure thus provides:
[0808] a method of inducing or promoting or enhancing mesenchymal stem cell, progenitor osteoblast (at any stage of differentiation of the Osteoblast cell lineage) differentiation, the method comprising administering to the cell an effective amount of at least one (modified) GFR-binding compound, at least one functionalised bioactive carrier, or at least one pharmaceutical composition, all as defined herein;
[0809] a method of inducing or promoting or enhancing or controlling or regulating bone tissue regeneration/formation, the method comprising administering to a mesenchymal stem cell or to a progenitor osteoblast at any stage of differentiation of the osteoblast cell lineage or to a mature osteoblast, an effective amount of at least one (modified) GFR-binding compound, at least one functionalised bioactive carrier, or at least one pharmaceutical composition, all as defined herein;
[0810] a method of inducing and/or promoting and/or enhancing osteocyte maturation, the method comprising administering to a differentiated osteoblast or to a mature osteoblast (e.g. an osteocyte) an effective amount of at least one (modified) GFR-binding compound, at least one functionalised bioactive carrier, or at least one pharmaceutical composition, all as defined herein;
[0811] an effective amount of at least one (modified) GFR-binding compound, at least one functionalised bioactive carrier, or at least one pharmaceutical composition, all as defined herein for use in a method of inducing or promoting or enhancing mesenchymal stem cell or progenitor osteoblast (at any stage of differentiation of the osteoblast cell lineage) differentiation;
[0812] an effective amount of at least one (modified) GFR-binding compound, at least one functionalised bioactive carrier, or at least one pharmaceutical composition, all as defined herein for use in a method of inducing or promoting or enhancing or controlling or regulating bone tissue regeneration/formation;
[0813] an effective amount of at least one (modified) GFR-binding compound, at least one functionalised bioactive carrier, or at least one pharmaceutical composition, all as defined herein for use in a method of inducing and/or promoting and/or enhancing osteoblast maturation.

[0814] In particular, medical applications which may result from the mediation of type I and II growth factor receptors by a (modified) GFR-binding compound, functionalised bioactive carrier, or pharmaceutical (therapeutic, dermatologic, ophthalmologic, diagnostic, etc.) composition, all as defined herein, include, but are not limited to, enhancing of chondrogenesis and/or inducing cartilage formation, and/or inducing chondrocyte maturation and/or treating and/or preventing at least one of osteoarthritis, costochondritis, Herniation, achondroplasia or relapsing polychondritis.

[0815] In one example, a (modified) GFR-binding compound, functionalised bioactive carrier, or pharmaceutical (therapeutic, dermatologic, ophthalmologic, diagnostic, etc.) composition, all as defined herein, may be a chondroinductive compound, bioactive carrier or composition which has demonstrated the ability to induce cartilage formation in vitro and/or ex-vivo and/or in vivo.

[0816] In one aspect, the present disclosure thus provides:
[0817] a method of inducing or promoting or enhancing mesenchymal stem cell, progenitor chondroblast (at any stage of differentiation of the chondrocytic cell lineage) differentiation, the method comprising administering to the cell an effective amount of at least one (modified) GFR-binding compound, at least one functionalised bioactive carrier, or at least one pharmaceutical composition, all as defined herein;
[0818] a method of inducing or promoting or enhancing or controlling or regulating cartilage tissue regeneration/formation, the method comprising administering to a mesenchymal stem cell or to a progenitor chondroblast (at any stage of differentiation of the chondrocytic cell lineage) or to a mature chondroblast, an effective amount of at least one (modified) GFR-binding compound, at least one functionalised bioactive carrier, or at least one pharmaceutical composition, all as defined herein;
[0819] a method of inducing and/or promoting and/or enhancing chondrocyte maturation, the method comprising administering to a differentiated chondroblast or to a mature osteoblast (e.g. a chondrocyte) an effective amount of at least one GFR-binding compound, at least one functionalised bioactive carrier, or at least one pharmaceutical composition, all as defined herein;
[0820] an effective amount of at least one (modified) GFR-binding compound, at least one functionalised bioactive carrier, or at least one pharmaceutical composition, all as defined herein for use in a method of inducing or promoting or enhancing mesenchymal stem cell or progenitor chondroblast (at any stage of differentiation of the chondrocytic cell lineage) differentiation;
[0821] an effective amount of at least one (modified) GFR-binding compound, at least one functionalised bioactive carrier, or at least one pharmaceutical composition, all as defined herein for use in a method of inducing or promoting or enhancing or controlling or regulating cartilage tissue regeneration/formation;
[0822] an effective amount of at least one (modified) GFR-binding compound, at least one functionalised bioactive carrier, or at least one pharmaceutical composition, all as defined herein for use in a method of inducing and/or promoting and/or enhancing chondroblast maturation.

[0823] In particular, medical applications which may result from the mediation of type I and II growth factor receptors by a GFR-binding compound, functionalised bioactive carrier, or pharmaceutical (therapeutic, dermatologic, ophthalmologic, diagnostic, etc.) composition, all as defined herein, include, but are not limited to, enhancing of endothelization and/or vascularization/angiogenesis and/or treating and/or preventing at least one of coronary artery disease (also known as coronary heart disease and ischemic heart disease), cardiomyopathy, hypertensive heart disease, heart failure, cor pulmonale, cardiac dysrhythmias, inflammatory heart disease, endocarditis, inflammatory cardiomegaly, myocarditis, valvular heart disease, cerebrovascular disease, peripheral arterial disease, congenital heart disease, or rheumatic heart disease.

[0824] In one example, a GFR-binding compound, functionalised bioactive carrier, or pharmaceutical (therapeutic, dermatologic, ophthalmologic, diagnostic, etc.) composition, all as defined herein, may be an endothelization/vascularization/angiogenesis—promoting compound, bioactive carrier or composition which has demonstrated the ability to induce vascular tissue formation in vitro and/or ex-vivo and/or in vivo.

[0825] In one aspect, the present disclosure thus provides:
[0826] a method of inducing or promoting or enhancing mesenchymal stem cell, progenitor endothelial cell (at any stage of differentiation of the vascular cell lineage) differentiation, the method comprising administering to the cell an effective amount of at least one (modified) GFR-binding compound, at least one functionalised bioactive carrier, or at least one pharmaceutical composition, all as defined herein;
[0827] a method of inducing or promoting or enhancing or controlling or regulating vascular tissue regeneration/formation and/or tubular formation, the method comprising administering to a mesenchymal stem cell or to a progenitor endothelial cell at any stage of differentiation of the vascular cell lineage or to a mature endothelial cell, an effective amount of at least one (modified) GFR-binding compound, at least one functionalised bioactive carrier, or at least one pharmaceutical composition, all as defined herein;
[0828] a method of inducing and/or promoting and/or enhancing cell motility or single/collective endothelial cell migration and/or angiogenesis, the method comprising administering to a mesenchymal stem cell or to a progenitor endothelial cell at any stage of differentiation of the vascular cell lineage or to a mature endothelial cell an effective amount of at least one (modified) GFR-binding compound, at least one functionalised bioactive carrier, or at least one pharmaceutical composition, all as defined herein.
[0829] a method of inducing and/or promoting and/or enhancing endothelial cell maturation, the method comprising administering to a differentiated endothelial cell or to a mature endothelial cell an effective amount of at least one (modified) GFR-binding compound, at least one functionalised bioactive carrier, or at least one pharmaceutical composition, all as defined herein;
[0830] an effective amount of at least one (modified) GFR-binding compound, at least one functionalised bioactive carrier, or at least one pharmaceutical composition, all as defined herein for use in a method of inducing or promoting or enhancing mesenchymal stem cell, progenitor endothelial cell (at any stage of differentiation of the vascular cell lineage) differentiation;
[0831] an effective amount of at least one (modified) GFR-binding compound, at least one functionalised bioactive carrier, or at least one pharmaceutical composition, all as defined herein for use in a method of inducing or promoting or enhancing or controlling or regulating vascular tissue regeneration/formation and/or tubular formation;
[0832] an effective amount of at least one (modified) GFR-binding compound, at least one functionalised bioactive carrier, or at least one pharmaceutical composition, all as defined herein for use in a method of inducing and/or promoting and/or enhancing cell motility or single/collective endothelial cell migration and/or angiogenesis,
[0833] an effective amount of at least one (modified) GFR-binding compound, at least one functionalised bioactive carrier, or at least one pharmaceutical composition, all as defined herein for use in a method of inducing and/or promoting and/or enhancing endothelial cell maturation.

[0834] In particular, medical applications which may result from the mediation of type I and II growth factor receptors by a GFR-binding compound, functionalised bioactive carrier, or pharmaceutical (therapeutic, dermatologic, ophthalmologic, diagnostic, etc.) composition, all as defined herein, include, but are not limited to, enhancing axonal dendritic neuron growth thus promoting neuron-regeneration and/or treating and/or preventing and/or decreasing or suppressing neuron degeneration-related conditions and diseases.

[0835] In the present description and unless otherwise indicated, the term “neuron-regeneration” or “neuroregeneration” means the regrowth or repair of nervous tissues, cells or cell products involving the participation of stem cells. Such mechanisms may include generation of new neurons, glia, axons, myelin, or synapses. Neurological disorders in which the present invention may thus be useful include, but are not limited to, ALS, Agraphia Alzheimer's disease, Amyotrophic lateral sclerosis, Angle man syndrome, Aphasia Apraxia, Arachnoiditis, Ataxia Telangiectasia, Attention deficit hyperactivity disorder, Auditory processing disorder, Autism, Alcoholism, asperger's syndrome, Bipolar disorder, Bells palsy, Brachial plexus injury, Brain damage, Brain injury, Canavan disease, Capgras delusion, Causalgia, Central pain syndrome, Central pontine myelinolysis, Centronuclear myopathy, Cephalic disorder, Cerebral aneurysm, Cerebral arteriosclerosis, Cerebral atrophy, Cerebral gigantism, Cerebral palsy, Cerebral vasculitis, Cervical spinal stenosis, Charcot-Marie-Tooth disease, Chiari malformation, Chorea, Chronic fatigue syndrome, Chronic inflammatory demyelinating polyneuropathy (CIDP), Chronic pain, Coffin-Lowry syndrome, Coma, Complex regional pain syndrome, Compression neuropathy, Congenital facial diplegia, Corticobasal degeneration, Cranial arteritis, Craniosynostosis, Creutzfeldt-Jakob disease, Cumulative trauma disorders, Cushing's syndrome, Cytomegalic inclusion body disease (CIBD), Cytomegalovirus Infection, Dandy-Walker syndrome, Dawson disease, De Morsier's syndrome, Dejerine-Klumpke palsy, Dejerine-Sottas disease, Delayed sleep phase syndrome, Dementia, Dermatomyositis, Developmental coordination disorder, Diabetic neuropathy, Diffuse sclerosis, Downs syndrome, Dravet syndrome, Dysautonomia, Dyscalculia, Dysgraphia, Dyslexia, Dystonia, Empty sella syndrome, Encephalitis, Encephalocele, Encephalotrigeminal angiomatosis, Encopresis, Epilepsy, Erb's palsy, Erythromelalgia, Essential tremor, Fabry's disease, Fahr's syndrome, Fainting, Familial spastic paralysis, Febrile seizures, Fisher syndrome, Friedreich's ataxia, Fibromyalgia, Foville's syndrome, Fetal alcohol syndrome, Fragile X Tremor Ataxia Syndrome, Gaucher's disease, Gerstmann's syndrome, Giant cell arteritis, Giant cell inclusion disease, Globoid Cell Leukodystrophy, Gray matter heterotopia, Guillain-Barré syndrome, HTLV-1 associated myelopathy, Hallervorden-Spatz disease, Head injury, Headache, Hemifacial Spasm, Hereditary Spastic Paraplegia, Heredopathia atactica polyneuritiformis, Herpes zoster oticus, Herpes zoster, Hirayama syndrome, Holoprosencephaly, Huntington's disease, Hydranencephaly, Hydrocephalus, Hypercortisolism, Hypoxia, Immune-Mediated encephalomyelitis, Inclusion body myositis, Incontinentia pigmenti, Infantile Refsum disease, Infantile spasms, Inflammatory myopathy, Intracranial cyst, Intracranial hypertension, Joubert syndrome, Karak syndrome, Kearns-Sayre syndrome, Kennedy disease, Kinsbourne syndrome, Kleine-Levin Syndrome, Klippel Feil syndrome, Krabbe disease, Kugelberg-Welander disease, Lafora disease, Lambert-Eaton myasthenic syndrome, Landau-Kleffner syndrome, Lateral medullary (Wallenberg) syndrome, Learning disabilities, Leigh's disease, Lennox-Gastaut syndrome, Lesch-Nyhan syndrome, Leukodystrophy, Lewy body dementia, Lissencephaly, Locked-In syndrome, Lou Gehrig's disease (See amyotrophic lateral sclerosis), Lumbar disc disease, Lumbar spinal stenosis, Lyme disease-Neurological Sequelae, Machado-Joseph disease (Spinocerebellar ataxia type 3), Macrencephaly, Macropsia, Megalencephaly, Mekersson-Rosenthal syndrome, Menieres disease, Meningitis, Menkes disease, Metachromatic leukodystrophy, Microcephaly, Micropsia, Migraine, Miller Fisher syndrome, Mini-stroke (transient ischemic attack), Misophonia, Mitochondrial myopathy, Mobius syndrome, Monomelic amyotrophy, Motor Neurone Disease—see amyotrophic lateral sclerosis, Motor skills disorder, Moyamoya disease, Mucopolysaccharidoses, Multi-infarct dementia, Multifocal motor neuropathy, Multiple sclerosis, Multiple system atrophy, Muscular dystrophy, Myalgic encephalomyelitis, Myasthenia gravis, Myelinoclastic diffuse sclerosis, Myoclonic Encephalopathy of infants, Myoclonus, Myopathy, Myotubular myopathy, Myotonia congenital, Narcolepsy, Neuro-Behçet's disease, Neurofibromatosis, Neuroleptic malignant syndrome, Neurological manifestations of AIDS, Neurological sequelae of lupus, Neuromyotonia, Neuronal ceroid lipofuscinosis, Neuronal migration disorders, Neuropathy, Neurosis, Niemann-Pick disease, Non-24-hour sleep-wake disorder, Nonverbal learning disorder, O'Sullivan-McLeod syndrome, Occipital Neuralgia, Occult Spinal Dysraphism Sequence, Ohtahara syndrome, Olivopontocerebellar atrophy, Opsoclonus myoclonus syndrome, Optic neuritis, Orthostatic Hypotension, Otosclerosis, Overuse syndrome, Palinopsia, Paresthesia, Parkinson's disease, Paramyotonia Congenita, Paroxysmal attacks, Parry-Romberg syndrome, Pelizaeus-Merzbacher disease, Periodic Paralyses, Peripheral neuropathy, Pervasive developmental disorders, Photic sneeze reflex, Phytanic acid storage disease, Pick's disease, Pinched nerve, PMG, Polyneuropathy, Polio, Polymicrogyria, Polymyositis, Porencephaly, Post-Polio syndrome, Postherpetic Neuralgia (PHN), Postural Hypotension, Prader-Willi syndrome, Primary Lateral Sclerosis, Prion diseases, Progressive hemifacial atrophy, Progressive multifocal leukoencephalopathy, Progressive Supranuclear Palsy, Quadriplegia, Rabies, Ramsay Hunt syndrome type I, Ramsay Hunt syndrome type II, Ramsay Hunt syndrome type Ill, Rasmussen's encephalitis, Reflex neurovascular dystrophy, Refsum disease, Repetitive stress injury, Restless legs syndrome, Retrovirus-associated myelopathy, Rett syndrome, Reye's syndrome, Rhythmic Movement Disorder, Romberg syndrome, Saint Vitus dance, Sandhoff disease, Schizencephaly, Sensory processing disorder, Septo-optic dysplasia, Shaken baby syndrome, Shingles, Shy-Drager syndrome, Sjögren's syndrome, Sleep apnea, Sleeping sickness, Snatiation, Sotos syndrome, Spasticity, Spina bifida, Spinal cord injury, Spinal muscular atrophy, Spinocerebellar ataxia, Split-brain, Steele-Richardson-Olszewski syndrome, Stiff-person syndrome, Stroke, Sturge-Weber syndrome, Subacute sclerosing panencephalitis, Subcortical arteriosclerotic encephalopathy, Superficial siderosis, Sydenham's chorea, Syncope, Synesthesia, Syringomyelia, Tarsal tunnel syndrome, Tardive dyskinesia, Tardive dysphrenia, Tarlov cyst, Tay-Sachs disease, Temporal arteritis, Tetanus, Tethered spinal cord syndrome, Thomsen disease, Thoracic outlet syndrome, Tic Douloureux, Todd's paralysis, Tourette syndrome, Toxic encephalopathy, Transient ischemic attack, Transmissible spongiform encephalopathies, Transverse myelitis, Traumatic brain injury, Tremor, Trigeminal neuralgia, Tropical spastic paraparesis, Trypanosomiasis, Tuberous sclerosis, Ubisiosis, Von Hippel-Lindau disease (VHL), Viliuisk Encephalomyelitis (VE), Wallenberg's syndrome, Werdnig-Hoffman disease, West syndrome, Whiplash, Williams syndrome, Wilson's disease and Zellweger syndrome.

[0836] In one example, a GFR-binding compound, functionalised bioactive carrier, or pharmaceutical (therapeutic, dermatologic, ophthalmologic, diagnostic, etc.) composition, all as defined herein, may be a neuroregenerative or neurodegeneration regulator/modulator/inhibitor compound, bioactive carrier or composition which has demonstrated the ability to induce neuroregeneration and/or prevention, decrease or suppression of neuron degeneration in vitro and/or ex-vivo and/or in vivo.

[0837] In one aspect, the present disclosure thus provides:
[0838] a method of inducing or promoting or enhancing mesenchymal stem cell, progenitor neuronal cell (at any stage of differentiation of the neuronal cell lineage) differentiation, the method comprising administering to the cell an effective amount of at least one (modified) GFR-binding compound, at least one functionalised bioactive carrier, or at least one pharmaceutical composition, all as defined herein;
[0839] a method of inducing or promoting or enhancing or controlling or regulating neuron regeneration/formation, the method comprising administering to a mesenchymal stem cell or to a progenitor neuronal cell at any stage of differentiation of the neuronal cell lineage or to a mature neuron, an effective amount of at least one (modified) GFR-binding compound, at least one functionalised bioactive carrier, or at least one pharmaceutical composition, all as defined herein;
[0840] a method of inducing and/or promoting and/or enhancing neuronal cell maturation, the method comprising administering to a differentiated neuronal cell or to a mature neuronal cell an effective amount of at least one (modified) GFR-binding compound, at least one functionalised bioactive carrier, or at least one pharmaceutical composition, all as defined herein;
[0841] an effective amount of at least one (modified) GFR-binding compound, at least one functionalised bioactive carrier, or at least one pharmaceutical composition, all as defined herein for use in a method of inducing or promoting or enhancing mesenchymal stem cell or progenitor neuronal cell (at any stage of differentiation of the neuronal cell lineage) differentiation;
[0842] an effective amount of at least one (modified) GFR-binding compound, at least one functionalised bioactive carrier, or at least one pharmaceutical composition, all as defined herein for use in a method of inducing or promoting or enhancing or controlling or regulating neuron regeneration/formation;
[0843] an effective amount of at least one (modified) GFR-binding compound, at least one functionalised bioactive carrier, or at least one pharmaceutical composition, all as defined herein for use in a method of inducing and/or promoting and/or enhancing neuronal cell maturation.

[0844] In particular, medical applications which may result from the mediation of type I and II growth factor receptors by a GFR-binding compound, functionalised bioactive carrier, or pharmaceutical (therapeutic, dermatologic, ophthalmologic, diagnostic, etc.) composition, all as defined herein, include, but are not limited to, enhancing/promoting eye retina cell regeneration and/or treating and/or preventing and/or decreasing or suppressing eye retina cell degeneration-related conditions or diseases.

[0845] Eye-related diseases or disorders in which the present invention may thus be useful include, but are not limited to, Focal chorioretinal inflammation Focal such chorioretinitis, choroiditis, retinitis and retinochoroiditis, Disseminated chorioretinal inflammation, Posterior cyclitis, Harada's disease, Chorioretinal scars such as Macula scars of posterior pole and Solar retinopathy, Choroidal degeneration such as Atrophy and Sclerosis, Hereditary choroidal dystrophy such as Choroideremia, Gyrate atrophy, Choroidal haemorrhage, Choroidal detachment, Chorioretinitis, Retinal detachment, Retinoschisis, Retinal vascular occlusions, Hypertensive retinopathy, Diabetic retinopathy, Retinopathy, Retinopathy of prematurity, Age-related macular degeneration, Macular degeneration, Epiretinal membrane, Peripheral retinal degeneration, Hereditary retinal dystrophy, Retinitis pigmentosa, Retinal haemorrhage, Central serous retinopathy, Retinal detachment and Macular edema.

[0846] In one example, a GFR-binding compound, functionalised bioactive carrier, or pharmaceutical (therapeutic, dermatologic, ophthalmologic, diagnostic, etc.) composition, all as defined herein, may be an eye tissue-regenerative or eye tissue-degeneration regulator/modulator/inhibitor compound, bioactive carrier or composition which has demonstrated the ability to induce eye retina cell regeneration and/or prevent and/or decrease or suppress eye retina cell degeneration in vitro and/or ex-vivo and/or in vivo.

[0847] In one aspect, the present disclosure thus provides:
[0848] a method of inducing or promoting or enhancing mesenchymal stem cell, progenitor eye retina cell (at any stage of differentiation of the retinal cell lineage) differentiation, the method comprising administering to the cell an effective amount of at least one (modified) GFR-binding compound, at least one functionalised bioactive carrier, or at least one pharmaceutical composition, all as defined herein;
[0849] a method of inducing or promoting or enhancing or controlling or regulating eye retina cell regeneration/formation, the method comprising administering to a mesenchymal stem cell or to a progenitor eye retina cell at any stage of differentiation of the retinal cell lineage or to a mature eye retina cell, an effective amount of at least one (modified) GFR-binding compound, at least one functionalised bioactive carrier, or at least one pharmaceutical composition, all as defined herein;
[0850] a method of inducing and/or promoting and/or enhancing eye retina cell maturation, the method comprising administering to a differentiated eye retina cell or to a mature eye retina cell an effective amount of at least one (modified) GFR-binding compound, at least one functionalised bioactive carrier, or at least one pharmaceutical composition, all as defined herein;
[0851] an effective amount of at least one (modified) GFR-binding compound, at least one functionalised bioactive carrier, or at least one pharmaceutical composition, all as defined herein for use in a method of inducing or promoting or enhancing mesenchymal stem cell or progenitor eye retina cell (at any stage of differentiation of the retinal cell lineage) differentiation;
[0852] an effective amount of at least one (modified) GFR-binding compound, at least one functionalised bioactive carrier, or at least one pharmaceutical composition, all as defined herein for use in a method of inducing or promoting or enhancing or controlling or regulating eye retina cell regeneration/formation;
[0853] an effective amount of at least one (modified) GFR-binding compound, at least one functionalised bioactive carrier, or at least one pharmaceutical composition, all as defined herein for use in a method of inducing and/or promoting and/or enhancing eye retina cell maturation.

[0854] In particular, medical applications which may result from the mediation of type I and II growth factor receptors by a GFR-binding compound, functionalised bioactive carrier, or pharmaceutical (therapeutic, dermatologic, ophthalmologic, diagnostic, etc.) composition, all as defined herein, include, but are not limited to, enhancing/promoting renal functions such as enhancing/improving waste removal, body's fluid balance control and electrolytes balance control and/or preventing/treating kidneys failure and/or chronic kidney disease (CKD) and/or renal fibrosis.

[0855] In one example, a GFR-binding compound, functionalised bioactive carrier, or pharmaceutical (therapeutic, dermatologic, ophthalmologic, diagnostic, etc.) composition, all as defined herein, may be a kidneys-function enhancing compound, bioactive carrier or composition which has demonstrated the ability to promote/improve kidneys functions and/or preventing/treating kidneys failure and/or chronic kidney disease (CKD) and/or renal fibrosis in vitro and/or ex-vivo and/or in vivo.

[0856] In one aspect, the present disclosure thus provides:
[0857] a method of inducing or promoting or enhancing mesenchymal stem cell, progenitor renal cell (at any stage of differentiation of the renal cell lineage) differentiation, the method comprising administering to the cell an effective amount of at least one (modified) GFR-binding compound, at least one functionalised bioactive carrier, or at least one pharmaceutical composition, all as defined herein;
[0858] a method of inducing or promoting or enhancing or controlling or regulating renal cell regeneration/formation, the method comprising administering to a mesenchymal stem cell or to a progenitor renal cell at any stage of differentiation of the renal cell lineage or to a mature renal cell, an effective amount of at least one (modified) GFR-binding compound, at least one functionalised bioactive carrier, or at least one pharmaceutical composition, all as defined herein;
[0859] a method of inducing and/or promoting and/or enhancing renal cell maturation, the method comprising administering to a differentiated renal cell or to a mature renal cell an effective amount of at least one (modified) GFR-binding compound, at least one functionalised bioactive carrier, or at least one pharmaceutical composition, all as defined herein;
[0860] an effective amount of at least one (modified) GFR-binding compound, at least one functionalised bioactive carrier, or at least one pharmaceutical composition, all as defined herein for use in a method of inducing or promoting or enhancing mesenchymal stem cell or progenitor renal cell (at any stage of differentiation of the renal cell lineage) differentiation;
[0861] an effective amount of at least one (modified) GFR-binding compound, at least one functionalised bioactive carrier, or at least one pharmaceutical composition, all as defined herein for use in a method of inducing or promoting or enhancing or controlling or regulating renal cell regeneration/formation;
[0862] an effective amount of at least one (modified) GFR-binding compound, at least one functionalised bioactive carrier, or at least one pharmaceutical composition, all as defined herein for use in a method of inducing and/or promoting and/or enhancing renal cell maturation.

[0863] In particular, medical applications which may result from the mediation of type I and II growth factor receptors by a GFR-binding compound, functionalised bioactive carrier, or pharmaceutical (therapeutic, dermatologic, ophthalmologic, diagnostic, etc.) composition, all as defined herein, include, but are not limited to, enhancing/promoting fibrous tissue formation and tendon and ligament regeneration and/or preventing and/or decreasing or suppressing tendon/ligament cell degeneration.

[0864] In one example, a GFR-binding compound, functionalised bioactive carrier, or pharmaceutical (therapeutic, dermatologic, ophthalmologic, diagnostic, etc.) composition, all as defined herein, may be a fibrous tissue formation promoting compound, bioactive carrier or composition which has demonstrated the ability to induce fibrous tissue formation in vitro and/or ex-vivo and/or in vivo.

[0865] In one aspect, the present disclosure thus provides:
[0866] a method of inducing or promoting or enhancing mesenchymal stem cell, progenitor tendon/ligament cell (at any stage of differentiation of the T/L cell lineage) differentiation, the method comprising administering to the cell an effective amount of at least one (modified) GFR-binding compound, at least one functionalised bioactive carrier, or at least one pharmaceutical composition, all as defined herein;
[0867] a method of inducing or promoting or enhancing or controlling or regulating tendon/ligament cell regeneration/formation, the method comprising administering to a mesenchymal stem cell or to a progenitor tendon/ligament cell at any stage of differentiation of the T/L cell lineage or to a mature tendon/ligament cell, an effective amount of at least one (modified) GFR-binding compound, at least one functionalised bioactive carrier, or at least one pharmaceutical composition, all as defined herein;
[0868] a method of inducing and/or promoting and/or enhancing tendon/ligament cell maturation, the method comprising administering to a differentiated tendon/ligament cell or to a mature tendon/ligament cell an effective amount of at least one (modified) GFR-binding compound, at least one functionalised bioactive carrier, or at least one pharmaceutical composition, all as defined herein;
[0869] an effective amount of at least one (modified) GFR-binding compound, at least one functionalised bioactive carrier, or at least one pharmaceutical composition, all as defined herein for use in a method of inducing or promoting or enhancing mesenchymal stem cell or progenitor tendon/ligament cell (at any stage of differentiation of the T/L cell lineage) differentiation;
[0870] an effective amount of at least one (modified) GFR-binding compound, at least one functionalised bioactive carrier, or at least one pharmaceutical composition, all as defined herein for use in a method of inducing or promoting or enhancing or controlling or regulating tendon/ligament cell regeneration/formation;
[0871] an effective amount of at least one (modified) GFR-binding compound, at least one functionalised bioactive carrier, or at least one pharmaceutical composition, all as defined herein for use in a method of inducing and/or promoting and/or enhancing tendon/ligament cell maturation.

[0872] In particular, medical applications which may result from the mediation of type I and II growth factor receptors by a GFR-binding compound, functionalised bioactive carrier, or pharmaceutical (therapeutic, dermatologic, ophthalmologic, diagnostic, etc.) composition, all as defined herein, include, but are not limited to, hair follicle tissue regeneration and formation (hair growth), hair follicle stem cell activation (loss of quiescence state) and/or preventing/treating alopecia areata, alopecia totalis, alopecia universalis, androgenic alopecia (male pattern baldness), telogen effluvium, anagen effluvium or chemotherapy-induced alopecia.

[0873] In one example, a GFR-binding compound, functionalised bioactive carrier, or pharmaceutical (therapeutic, dermatologic, ophthalmologic, diagnostic, etc.) composition, all as defined herein, may be a hair follicle growth activation promoting compound, bioactive carrier or composition which has demonstrated the ability to induce hair follicle formation and/or hair follicle stem cell activation in vitro and/or ex-vivo and/or in vivo.

[0874] In one aspect, the present disclosure thus provides:
[0875] a method of inducing or promoting or enhancing mesenchymal stem cell, progenitor hair follicle cell (at any stage of differentiation of the hair follicle cell lineage) differentiation, the method comprising administering to the cell an effective amount of at least one (modified) GFR-binding compound, at least one functionalised bioactive carrier, or at least one pharmaceutical composition, all as defined herein;
[0876] a method of inducing or promoting or enhancing or controlling or regulating hair follicle cell regeneration/formation, the method comprising administering to a mesenchymal stem cell or to a progenitor hair follicle cell at any stage of differentiation of the hair follicle cell lineage or to a mature hair follicle cell, an effective amount of at least one (modified) GFR-binding compound, at least one functionalised bioactive carrier, or at least one pharmaceutical composition, all as defined herein;
[0877] a method of inducing and/or promoting and/or enhancing hair follicle cell maturation, the method comprising administering to a differentiated hair follicle cell or to a mature hair follicle cell an effective amount of at least one (modified) GFR-binding compound, at least one functionalised bioactive carrier, or at least one pharmaceutical composition, all as defined herein;
[0878] a method of activating hair follicle stem cells, the method comprising administering to a quiescent hair follicle stem cell an effective amount of at least one (modified) GFR-binding compound, at least one functionalised bioactive carrier, or at least one pharmaceutical composition, all as defined herein;
[0879] an effective amount of at least one (modified) GFR-binding compound, at least one functionalised bioactive carrier, or at least one pharmaceutical composition, all as defined herein for use in a method of inducing or promoting or enhancing mesenchymal stem cell or progenitor hair follicle cell (at any stage of differentiation of the hair follicle cell lineage) differentiation;
[0880] an effective amount of at least one (modified) GFR-binding compound, at least one functionalised bioactive carrier, or at least one pharmaceutical composition, all as defined herein for use in a method of inducing or promoting or enhancing or controlling or regulating hair follicle cell regeneration/formation;
[0881] an effective amount of at least one (modified) GFR-binding compound, at least one functionalised bioactive carrier, or at least one pharmaceutical composition, all as defined herein for use in a method of inducing and/or promoting and/or enhancing tendon/ligament cell maturation;
[0882] an effective amount of at least one (modified) GFR-binding compound, at least one functionalised bioactive carrier, or at least one pharmaceutical composition, all as defined herein for use in a method of activating hair follicle stem cells.

[0883] In particular, medical applications which may result from the mediation of type I and II growth factor receptors by a GFR-binding compound, functionalised bioactive carrier, or pharmaceutical (therapeutic, dermatologic, ophthalmologic, diagnostic, etc.) composition, all as defined herein, include, but are not limited to, enhancing tissue closure.

[0884] In one example, a GFR-binding compound, functionalised bioactive carrier, or pharmaceutical (therapeutic, dermatologic, ophthalmologic, diagnostic, etc.) composition, all as defined herein, may be a tissue-closure-promoting compound or biomaterial which has demonstrated the ability to induce tissue closure in vitro and/or ex-vivo and/or in vivo.

[0885] In one aspect, the present disclosure thus provides:
[0886] a method of inducing or promoting or enhancing tissue closure, the method comprising administering to an incised/opened tissue an effective amount of at least one (modified) GFR-binding compound, at least one functionalised bioactive carrier, or at least one pharmaceutical composition, all as defined herein;
[0887] an effective amount of at least one (modified) GFR-binding compound, at least one functionalised bioactive carrier, or at least one pharmaceutical composition, all as defined herein for use in a method of inducing or promoting or enhancing tissue closure.

[0888] In particular, medical applications which may result from the mediation of type I and II growth factor receptors by a GFR-binding compound, functionalised bioactive carrier, or pharmaceutical (therapeutic, dermatologic, ophthalmologic, diagnostic, etc.) composition, all as defined herein, include, but are not limited to, enhancing/promoting female fertility and/or preventing and/or decreasing or suppressing female infertility.

[0889] In one example, a GFR-binding compound, functionalised bioactive carrier, or pharmaceutical (therapeutic, dermatologic, ophthalmologic, diagnostic, etc.) composition, all as defined herein, may be a female fertility enhancing or a female infertility regulator/modulator/inhibitor compound, bioactive carrier or composition which has demonstrated the ability to enhance/promote female fertility and/or prevent and/or decrease or suppress female infertility in vitro and/or ex-vivo and/or in vivo.

[0890] In one aspect, the present disclosure thus provides:
[0891] a method of inducing or promoting or enhancing mesenchymal stem cell, progenitor ovarian cell (at any stage of differentiation of the reproduction system lineage) differentiation, the method comprising administering to the cell an effective amount of at least one (modified) GFR-binding compound, at least one functionalised bioactive carrier, or at least one pharmaceutical composition, all as defined herein;
[0892] a method of inducing or promoting or enhancing or controlling or regulating ovarian cell regeneration/formation, the method comprising administering to a mesenchymal stem cell or to a progenitor ovarian cell at any stage of differentiation of the reproduction system lineage or to a mature ovarian cell, an effective amount of at least one (modified) GFR-binding compound, at least one functionalised bioactive carrier, or at least one pharmaceutical composition, all as defined herein;
[0893] a method of inducing and/or promoting and/or enhancing ovarian cell maturation, the method comprising administering to a differentiated ovarian cell or to a mature ovarian cell an effective amount of at least one (modified) GFR-binding compound, at least one functionalised bioactive carrier, or at least one pharmaceutical composition, all as defined herein;
[0894] an effective amount of at least one (modified) GFR-binding compound, at least one functionalised bioactive carrier, or at least one pharmaceutical composition, all as defined herein for use in a method of inducing or promoting or enhancing mesenchymal stem cell or progenitor ovarian cell (at any stage of differentiation of the reproduction system lineage) differentiation;
[0895] an effective amount of at least one (modified) GFR-binding compound, at least one functionalised bioactive carrier, or at least one pharmaceutical composition, all as defined herein for use in a method of inducing or promoting or enhancing or controlling or regulating ovarian cell regeneration/formation;
[0896] an effective amount of at least one (modified) GFR-binding compound, at least one functionalised bioactive carrier, or at least one pharmaceutical composition, all as defined herein for use in a method of inducing and/or promoting and/or enhancing ovarian cell maturation.

[0897] In particular, medical applications which may result from the mediation of type I and II growth factor receptors by a (modified) GFR-binding compound, functionalised bioactive carrier, or pharmaceutical (therapeutic, dermatologic, ophthalmologic, diagnostic, etc.) composition, all as defined herein, include, but are not limited to, enhancing of myogenesis, inducing muscle tissue formation, reinforcing muscle tissues, inducing myocyte maturation, repairing damaged muscles, preventing muscle tissue degeneration or damages, and/or protecting a subject from one or more muscle tissue-related diseases, disorders, conditions or pathologies such as myopathies, muscular atrophy, disuse atrophy, denervation atrophy, muscular dystrophies such as the Duchenne muscular dystrophy (DMD), and the Becker muscular dystrophy (BMD), fibrosis, fibrositis, muscle weakness, fatigue, cramps, fibromyalgia, or chronic muscle pain syndrome.

[0898] In one example, a (modified) GFR-binding compound, functionalised bioactive carrier, or pharmaceutical (therapeutic, dermatologic, ophthalmologic, diagnostic, etc.) composition, all as defined herein, may thus be an myoinductive compound, bioactive carrier or composition which has demonstrated an ability to induce muscle tissue formation in vitro and/or ex-vivo and/or in vivo.

[0899] In one aspect, the present disclosure thus provides:
[0900] a method of inducing or promoting or enhancing mesenchymal stem cell, progenitor myoblast (at any stage of differentiation of the muscle cell lineage) differentiation, the method comprising administering to the cell an effective amount of at least one (modified) GFR-binding compound, at least one functionalised bioactive carrier, or at least one pharmaceutical composition, all as defined herein;
[0901] a method of inducing or promoting or enhancing or controlling or regulating muscle tissue regeneration/formation, the method comprising administering to a mesenchymal stem cell or to a progenitor myoblast at any stage of differentiation of the muscle cell lineage or to a mature myoblast, an effective amount of at least one (modified) GFR-binding compound, at least one functionalised bioactive carrier, or at least one pharmaceutical composition, all as defined herein;
[0902] a method of inducing and/or promoting and/or enhancing myocyte maturation, the method comprising administering to a differentiated myoblast or to a mature myoblast (e.g. an myocyte) an effective amount of at least one (modified) GFR-binding compound, at least one functionalised bioactive carrier, or at least one pharmaceutical composition, all as defined herein;
[0903] an effective amount of at least one (modified) GFR-binding compound, at least one functionalised bioactive carrier, or at least one pharmaceutical composition, all as defined herein for use in a method of inducing or promoting or enhancing mesenchymal stem cell or progenitor myoblast (at any stage of differentiation of the muscle cell lineage) differentiation;
[0904] an effective amount of at least one (modified) GFR-binding compound, at least one functionalised bioactive carrier, or at least one pharmaceutical composition, all as defined herein for use in a method of inducing or promoting or enhancing or controlling or regulating muscle tissue regeneration/formation;
[0905] an effective amount of at least one (modified) GFR-binding compound, at least one functionalised bioactive carrier, or at least one pharmaceutical composition, all as defined herein for use in a method of inducing and/or promoting and/or enhancing myoblast maturation.

[0906] In particular, medical applications which may result from the mediation of type I and II growth factor receptors by a (modified) GFR-binding compound, functionalised bioactive carrier, or pharmaceutical (therapeutic, dermatologic, ophthalmologic, diagnostic, etc.) composition, all as defined herein, include, but are not limited to, enhancing blood tissue regeneration, inducing blood cell differentiation, or protecting a patient from a blood cell degeneration-related disease, condition, disorder, or pathology.

[0907] In one example, a (modified) GFR-binding compound, functionalised bioactive carrier, or pharmaceutical (therapeutic, dermatologic, ophthalmologic, diagnostic, etc.) composition, all as defined herein, may thus be a blood cell degeneration inhibitor, bioactive carrier or composition which has demonstrated an ability to induce blood cell formation in vitro and/or ex-vivo and/or in vivo.

[0908] In one aspect, the present disclosure thus provides:
[0909] a method of inducing or promoting or enhancing mesenchymal stem cell, progenitor blood cell (at any stage of differentiation of the Osteoblast cell lineage) differentiation, the method comprising administering to the cell an effective amount of at least one (modified) GFR-binding compound, at least one functionalised bioactive carrier, or at least one pharmaceutical composition, all as defined herein;
[0910] a method of inducing or promoting or enhancing or controlling or regulating blood cell regeneration/formation, the method comprising administering to a mesenchymal stem cell or to a progenitor blood cell at any stage of differentiation of the blood cell lineage or to a mature blood cell, an effective amount of at least one (modified) GFR-binding compound, at least one functionalised bioactive carrier, or at least one pharmaceutical composition, all as defined herein;
[0911] a method of inducing and/or promoting and/or enhancing blood cell maturation, the method comprising administering to a differentiated blood cell or to a mature blood cell (e.g. a mature red blood cell) an effective amount of at least one (modified) GFR-binding compound, at least one functionalised bioactive carrier, or at least one pharmaceutical composition, all as defined herein;
[0912] an effective amount of at least one (modified) GFR-binding compound, at least one functionalised bioactive carrier, or at least one pharmaceutical composition, all as defined herein for use in a method of inducing or promoting or enhancing mesenchymal stem cell or progenitor blood cell (at any stage of differentiation of the blood cell lineage) differentiation;
[0913] an effective amount of at least one (modified) GFR-binding compound, at least one functionalised bioactive carrier, or at least one pharmaceutical composition, all as defined herein for use in a method of inducing or promoting or enhancing or controlling or regulating blood cell regeneration/formation;
[0914] an effective amount of at least one (modified) GFR-binding compound, at least one functionalised bioactive carrier, or at least one pharmaceutical composition, all as defined herein for use in a method of inducing and/or promoting and/or enhancing blood cell maturation.

[0915] In particular, medical applications which may result from the mediation of type I and II growth factor receptors by a (modified) GFR-binding compound, functionalised bioactive carrier, or pharmaceutical (therapeutic, dermatologic, ophthalmologic, diagnostic, etc.) composition, all as defined herein, include, but are not limited to, enhancing of lung tissue regeneration, inducing lung cell differentiation, or protecting a patient from a lung cell degeneration-related disease, condition, disorder, or pathology.

[0916] In one example, a (modified) GFR-binding compound, functionalised bioactive carrier, or pharmaceutical (therapeutic, dermatologic, ophthalmologic, diagnostic, etc.) composition, all as defined herein, may thus be a lung cell degeneration inhibitor, bioactive carrier or composition which has demonstrated an ability to induce lung cell formation in vitro and/or ex-vivo and/or in vivo.

[0917] In one aspect, the present disclosure thus provides:
[0918] a method of inducing or promoting or enhancing mesenchymal stem cell, progenitor lung cell (at any stage of differentiation of the Osteoblast cell lineage) differentiation, the method comprising administering to the cell an effective amount of at least one (modified) GFR-binding compound, at least one functionalised bioactive carrier, or at least one pharmaceutical composition, all as defined herein;
[0919] a method of inducing or promoting or enhancing or controlling or regulating lung cell regeneration/formation, the method comprising administering to a mesenchymal stem cell or to a progenitor lung cell at any stage of differentiation of the lung cell lineage or to a mature lung cell, an effective amount of at least one (modified) GFR-binding compound, at least one functionalised bioactive carrier, or at least one pharmaceutical composition, all as defined herein;
[0920] a method of inducing and/or promoting and/or enhancing lung cell maturation, the method comprising administering to a differentiated lung cell or to a mature lung cell an effective amount of at least one (modified) GFR-binding compound, at least one functionalised bioactive carrier, or at least one pharmaceutical composition, all as defined herein;
[0921] an effective amount of at least one (modified) GFR-binding compound, at least one functionalised bioactive carrier, or at least one pharmaceutical composition, all as defined herein for use in a method of inducing or promoting or enhancing mesenchymal stem cell or progenitor lung cell (at any stage of differentiation of the lung cell lineage) differentiation;
[0922] an effective amount of at least one (modified) GFR-binding compound, at least one functionalised bioactive carrier, or at least one pharmaceutical composition, all as defined herein for use in a method of inducing or promoting or enhancing or controlling or regulating lung cell regeneration/formation;
[0923] an effective amount of at least one (modified) GFR-binding compound, at least one functionalised bioactive carrier, or at least one pharmaceutical composition, all as defined herein for use in a method of inducing and/or promoting and/or enhancing lung cell maturation.

[0924] In particular, medical applications which may result from the mediation of type I and II growth factor receptors by a (modified) GFR-binding compound, functionalised bioactive carrier, or pharmaceutical (therapeutic, dermatologic, ophthalmologic, diagnostic, etc.) composition, all as defined herein, include, but are not limited to, enhancing adipose tissue regeneration, inducing adipocyte differentiation, or protecting a patient from a adipose tissue degeneration-related disease, condition, disorder, or pathology.

[0925] In one example, a (modified) GFR-binding compound, functionalised bioactive carrier, or pharmaceutical (therapeutic, dermatologic, ophthalmologic, diagnostic, etc.) composition, all as defined herein, may thus be an adipose tissue degeneration inhibitor, bioactive carrier or composition which has demonstrated an ability to induce adipose tissue formation in vitro and/or ex-vivo and/or in vivo.

[0926] In one aspect, the present disclosure thus provides:
[0927] a method of inducing or promoting or enhancing mesenchymal stem cell, progenitor adipocyte (at any stage of differentiation of the Osteoblast cell lineage) differentiation, the method comprising administering to the cell an effective amount of at least one (modified) GFR-binding compound, at least one functionalised bioactive carrier, or at least one pharmaceutical composition, all as defined herein;
[0928] a method of inducing or promoting or enhancing or controlling or regulating adipose tissue regeneration/formation, the method comprising administering to a mesenchymal stem cell or to a progenitor adipocyte at any stage of differentiation of the adipocyte lineage or to a mature adipocyte, an effective amount of at least one (modified) GFR-binding compound, at least one functionalised bioactive carrier, or at least one pharmaceutical composition, all as defined herein;
[0929] a method of inducing and/or promoting and/or enhancing adipocyte maturation, the method comprising administering to a differentiated adipocyte or to a mature adipocyte an effective amount of at least one (modified) GFR-binding compound, at least one functionalised bioactive carrier, or at least one pharmaceutical composition, all as defined herein;
[0930] an effective amount of at least one (modified) GFR-binding compound, at least one functionalised bioactive carrier, or at least one pharmaceutical composition, all as defined herein for use in a method of inducing or promoting or enhancing mesenchymal stem cell or progenitor adipocyte (at any stage of differentiation of the adipocyte lineage) differentiation;
[0931] an effective amount of at least one (modified) GFR-binding compound, at least one functionalised bioactive carrier, or at least one pharmaceutical composition, all as defined herein for use in a method of inducing or promoting or enhancing or controlling or regulating adipose tissue regeneration/formation;
[0932] an effective amount of at least one (modified) GFR-binding compound, at least one functionalised bioactive carrier, or at least one pharmaceutical composition, all as defined herein for use in a method of inducing and/or promoting and/or enhancing adipocyte maturation.

[0933] Protected from a disease, condition, disorder or pathology refers to the treatment of the underlying cause of the disease, condition, disorder or pathology as well as reducing the symptoms of the disease, condition, disorder or pathology; and/or reducing the occurrence of the disease, condition, disorder or pathology; and/or reducing the severity of the disease, condition, disorder or pathology. Protecting a patient can refer to the ability of a therapeutic composition of the present invention, when administered to a patient, to prevent a disease, condition, disorder or pathology from occurring and/or to cure or to alleviate disease, condition, disorder or pathology symptoms, signs or causes. As such, to protect a patient from a disease, condition, disorder or pathology includes both preventing disease, condition, disorder or pathology occurrence (prophylactic treatment) and treating a patient that has a disease, condition, disorder or pathology or that is experiencing initial symptoms or later stage symptoms of a disease, condition, disorder or pathology (therapeutic treatment).

[0934] Treating: As used herein, unless indicated otherwise or contradictory in context, the term “treating” or “treatment” refers to partially or completely alleviating, ameliorating, improving, relieving, delaying onset of, inhibiting progression of, reducing severity of, and/or reducing incidence of one or more symptoms or features of a particular disease, disorder, pathology and/or condition. Treatment may be administered to a subject who does not exhibit signs of a disease, disorder, and/or condition and/or to a subject who exhibits only early signs of a disease, disorder, pathology and/or condition for the purpose of decreasing the risk of developing pathology associated with the disease, disorder, and/or condition.

[0935] Preventing: As used herein, unless indicated otherwise or contradictory in context, the term “preventing” refers to partially or completely delaying onset of an infection, disease, disorder and/or condition; partially or completely delaying onset of one or more symptoms, features, or clinical manifestations of a particular infection, disease, disorder, and/or condition; partially or completely delaying onset of one or more symptoms, features, or manifestations of a particular infection, disease, disorder, and/or condition; partially or completely delaying progression from an infection, a particular disease, disorder and/or condition; and/or decreasing the risk of developing pathology associated with the infection, the disease, disorder, and/or condition.

[0936] Disease: As used herein, unless indicated otherwise or contradictory in context, the term “disease” refers to any deviation from the normal health of a patient and includes a state when disease symptoms are present, as well as conditions in which a deviation has occurred, but symptoms are not yet manifested. The same applies to “condition”, “disorder” and “pathology”.

[0937] In one aspect, the present disclosure provides methods of determining the effectiveness of a (modified) GFR-binding compound, a functionalised bioactive carrier or a pharmaceutical composition as defined herein for inducing cell differentiation, or inducing, promoting, enhancing, controlling or regulating tissue regeneration/formation in-vitro, ex-vivo and in-vivo comprising the administration of said (modified) GFR-binding compound, a functionalised bioactive carrier or a pharmaceutical composition to a cell; the measurement of the expression of specific differentiation markers as defined herein in the cell; the comparison of the expression of said specific differentiation markers in the cell to the expression of said specific differentiation markers in a cell treated with a reference (or control) functionalised bioactive carrier, compound or solvent; and determining the effectiveness of the (modified) GFR-binding compound, a functionalised bioactive carrier or a pharmaceutical composition relative to the reference pharmaceutical association or compound.

[0938] In one aspect, the present disclosure provides methods to activate, promote, support, improve, or increase the activity of a growth factor receptor present in, on the surface of a mesenchymal stem cell or progenitor cell (at any stage of differentiation thereof) such that said cell may undergo efficient cell differentiation.

[0939] In one aspect, the present disclosure provides methods of identifying, diagnosing, and optionally classifying subjects on these bases, which may include clinical diagnosis, biomarker levels, and other methods known in the art.

[0940] XVII. Wound Healing Applications

[0941] Specific applications of the invention in dermatology relate to wound healing and skin repair.

[0942] Thus, dermatological applications which may result from the mediation of type I and II growth factor receptors by a compound, functionalised bioactive carrier, or composition of the invention include, but are not limited to, enhancing wound healing, skin repair and cellular migration.

[0943] Skin repair: In the present description and unless otherwise indicated, the term “skin repair” means dermal and epidermal cells regeneration, collagen and other skin protein synthesis by epithelial cells.

[0944] Cellular migration: In the present description and unless otherwise indicated, the term “cellular migration” means a central process in the development and maintenance of multicellular organisms. Tissue formation during embryonic development, wound healing and immune responses all require the orchestrated movement of cells in particular directions to specific locations. The cells involved in cellular migration include the cells of the epithelial and dermal cell lineages forming the connective tissue i.e. the fibroblasts, fibrocytes, myofibroblasts, adipocytes, synoviocytes, macrophages, histiocytes, granulocytes, plasmocytes and mastocytes.

[0945] In one example, a (modified) GFR-binding compound, functionalised bioactive carrier, or pharmaceutical (therapeutic, dermatologic, ophthalmologic, diagnostic, etc.) composition, all as defined herein, may be a wound-healing-promoting compound, bioactive carrier, or composition which has demonstrated the ability to induce wound healing, skin repair and/or cellular migration in vitro, ex-vivo and/or in vivo.

[0946] In one aspect, the present disclosure thus provides:
[0947] a method of inducing or promoting or enhancing mesenchymal stem cell, progenitor epithelial cell (at any stage of differentiation of the epithelial and dermal cell lineage) differentiation, the method comprising administering to the cell an effective amount of at least one (modified) GFR-binding compound, at least one functionalised bioactive carrier, or at least one pharmaceutical composition of the invention;
[0948] a method of inducing or promoting or enhancing or controlling or regulating skin tissue regeneration/formation and/or tubular formation, the method comprising administering to a mesenchymal stem cell or to a progenitor epithelial cell at any stage of differentiation of the epithelial and dermal cell lineage or to a mature epithelial cell, an effective amount of at least one (modified) GFR-binding compound, at least one functionalised bioactive carrier, or at least one pharmaceutical composition of the invention;
[0949] a method of inducing and/or promoting and/or enhancing cell motility or single/collective epithelial cell migration, the method comprising administering to a mesenchymal stem cell or to a progenitor epithelial cell at any stage of differentiation of the epithelial and dermal cell lineage or to a mature epithelial cell an effective amount of at least one (modified) GFR-binding compound, at least one functionalised bioactive carrier, or at least one pharmaceutical composition of the invention;
[0950] a method of inducing and/or promoting and/or enhancing epithelial cell maturation, the method comprising administering to a differentiated epithelial cell or to a mature epithelial cell an effective amount of at least one (modified) GFR-binding compound, at least one functionalised bioactive carrier, or at least one pharmaceutical composition of the invention;
[0951] an effective amount of at least one (modified) GFR-binding compound, at least one functionalised bioactive carrier, or at least one pharmaceutical composition of the invention for use in a method of inducing or promoting or enhancing mesenchymal stem cell, progenitor epithelial cell (at any stage of differentiation of the epithelial and dermal cell lineage) differentiation;
[0952] an effective amount of at least one (modified) GFR-binding compound, at least one functionalised bioactive carrier, or at least one pharmaceutical composition of the invention for use in a method of inducing or promoting or enhancing or controlling or regulating skin tissue regeneration/formation;
[0953] an effective amount of at least one (modified) GFR-binding compound, at least one functionalised bioactive carrier, or at least one pharmaceutical composition of the invention for use in a method of inducing and/or promoting and/or enhancing cell motility or single/collective epithelial cell migration,
[0954] an effective amount of at least one (modified) GFR-binding compound, at least one functionalised bioactive carrier, or at least one pharmaceutical composition of the invention for use in a method of inducing and/or promoting and/or enhancing epithelial cell maturation.

[0955] XVII. Cosmetic Applications

[0956] Skin ageing is typically associated with a deregulation of the metabolism of cutaneous cells characterized by a diminishing of the proliferation of keratinocytes, a deregulation of the differentiation of keratinocytes, an accumulation of dead cells, and a diminishing of the innervation of the skin.

[0957] Cosmetic, non-therapeutic, applications which may result from the mediation of type I and II growth factor receptors by a GFR-binding compound, functionalised bioactive carrier, or compositions thereof, all as defined herein, include, but are not limited to, enhancing/promoting skin regeneration, preventing and/or attenuating and/or masking and/or removing wrinkles, firming the skin, preventing and/or decreasing or suppressing skin pigmentation.

[0958] In one example, a GFR-binding compound, functionalised bioactive carrier, or compositions thereof, all as defined herein, may be an anti-wrinkle/ageing and/or skin-firming and/or skin regeneration-promoting compound, bioactive carrier or composition which has demonstrated the ability to enhance/promote skin cosmetic regeneration, prevent and/or attenuate and/or mask and/or remove wrinkles, firm the skin, prevent and/or decrease or suppress skin pigmentation in vitro and/or in vivo.

[0959] In one aspect, the present disclosure provides a cosmetic or functional food composition comprising at least one GFR-binding compound or at least one functionalised bioactive carrier, all as defined herein, in combination with at least one suitable cosmetic carrier, preferably suitable for topical application.

[0960] Suitable cosmetic carrier: The terms “suitable cosmetic carrier” used here, mean that the composition or the components of the latter are suitable for use in contact with human skin without undue toxicity, incompatibility, instability, allergic response or their equivalents.

[0961] In one aspect, the present disclosure provides a use of a GFR-binding compound, or functionalised bioactive carrier, all as defined herein, in cosmetics or as a functional food.

[0962] In one aspect, the present disclosure provides a use of a GFR-binding compound, functionalised bioactive carrier, or composition thereof, all as defined herein, or a cosmetic or functional food composition as defined herein as an anti-wrinkle/ageing agent. For example, in certain embodiments, the GFR-binding compound, functionalised bioactive carrier, or composition thereof, all as defined herein, is used as active ingredient to prevent or treat skin-ageing in a cosmetic composition or a functional food composition.

[0963] In one aspect, the present disclosure provides a use of a GFR-binding compound or functionalised bioactive carrier, all as defined herein, or a cosmetic composition thereof as defined herein in a method of cosmetic care, wherein said method of cosmetic care comprises the administration or the application of between about 0.0001 □g/day to about 5000 mg/day, between about 0.0001 □g/day to about 1000 mg/day, between about 0.0001 □g/day to about 10 mg/day, between about 0.0001 □g/day to about 1 mg/day, or between about 0.0001 □g/day to about 100 □g/day of said compound, bioactive carrier or composition, all being preferred and specifically contemplated for implementing embodiments of the invention.

[0964] In one example, the administration comprises the oral administration of a tablet, capsule, pill, powder, sustained release formulations, solution or suspension containing said GFR-binding compound or functionalised bioactive carrier, all as defined herein, or cosmetic or functional food compositions thereof as defined herein.

[0965] In one preferred example, said use comprises the topical application of a GFR-binding compound or functionalised bioactive carrier, all as defined herein, or cosmetic composition thereof as defined herein.

[0966] Suitable formulations for use in cosmetic care treatment include, for instance, the ones described in U.S. Pat. No. 8,497,241 B2, which is hereby incorporated by reference.

[0967] In one example, said cosmetic use of the invention is a non-therapeutic cosmetic use.

[0968] In one aspect, the present disclosure provides a cosmetic care or treatment method in which the GFR-binding compound, the functionalised bioactive carrier, or the cosmetic composition, all as defined herein, is used via topical application to stimulate the proliferation and/or activity of the fibroblasts.

[0969] For example, in certain embodiments, said cosmetic care method of the invention include treatment of skin ageing, especially unesthetic and/or uncomfortable manifestations of skin ageing, such as slackness of the tissues, loss of firmness of the tissues, the appearance of wrinkles, fine lines, and grooves, and/or for the cosmetic treatment and/or care of stretch marks and/or scars.

[0970] In one example, the cosmetic care method of the invention is preferably for protecting the skin against skin ageing.

[0971] Topical application: In the present description and unless otherwise indicated, the term “topical application” means to apply or spray the composition of the present invention onto the surface of the skin.

[0972] Cosmetic compositions of the invention may comprise other active agents of cosmetic interest especially the conventional agents for anti-ageing compositions especially those chosen from hyaluronic acid, ascorbic acid, retinol, alpha-hydroxy acids (AHAs) and/or ursolic acid.

[0973] In one example, the cosmetic composition of the invention may contain at least one of the following agents:
[0974] an agent that stimulates the fibronectin synthesis, in particular a maize extract;
[0975] an agent that stimulates the laminin synthesis, in particular an extract of malt;
[0976] an agent that stimulates the expression and/or the activity of hyaluronan synthase 2 (HAS2);
[0977] an agent that stimulates the synthesis of lysyl oxidase-like (LOXL);
[0978] an agent that stimulates the synthesis of intracellular ATP;
[0979] an agent that protects the degradation of FGF2.

[0980] GFR-binding compounds, or functionalised bioactive carrier in their cosmetic applications, optionally in the form of cosmetic compositions, are particularly suitable for protecting the skin against skin ageing that is natural and/or caused by climatic and environmental factors, especially the wind, pollution, UV rays, cigarette smoke and/or physiological factors, especially stress.

[0981] In one aspect, the present disclosure provides a cosmetic care or treatment method, for a subject having need thereof, said method comprising the application, preferably topical application, or administration of a cosmetic composition as defined herein.

[0982] In one example, the subject who has need of the cosmetic care of the invention is a subject chosen from a population having an average age of more than 30 years old, preferably of more than 40 years old, more preferably of more than 50 years old.

[0983] XIX. Hair Treatment Applications

[0984] Hair is subjected to a wide variety of severe stress, for example as a result of environmental influences, such as UV irradiation or weathering, mechanical stresses, such as combing, or various hair treatments, such as washing, drying with hot air, bleaching, coloring, perming, etc., which can lead to hair damage. Said damage includes e.g. dryness, reduced elasticity, brittleness, split ends, dullness, matt appearance, reduced fullness, rough surface and reduced mechanical strength. This leads to impaired combability, reduced shine, increased electrostatic charging, tendency to break and may go as far as hair loss in some cases. The hair wearer feels uneasy. Hair loss may be due to aging as through time, hair naturally tends to gradually thin. Other causes of hair loss include hormonal factors, medical conditions and medications. The most common cause of hair loss is a hereditary condition called male-pattern baldness or female-pattern baldness. In genetically susceptible people, certain sex hormones trigger a particular pattern of permanent hair loss. Most common in men, this type of hair thinning can begin as early as puberty. Hormonal changes and imbalances can also cause temporary hair loss. This could be due to pregnancy, childbirth, discontinuation of birth control pills or the onset of menopause. A variety of medical conditions may also cause hair loss, including, but not limited to, thyroid problems, alopecia areata, and scalp infections. Hair loss may further be caused by drugs used to treat Arthritis, depression, heart problems, high blood pressure, etc.

[0985] Medical or cosmetic applications which may result from the mediation of type I and II growth factor receptors by a (modified) GFR-binding compound, functionalised bioactive carrier or composition of the invention also include enhancing/promoting hair growth and/or preventing and/or decreasing or suppressing hair loss. Without wishing to be bound to any specific theories, this effect is thought to be achieved through activation of dormant (or quiescent) hair follicle stem cells by displacement of natural binding ligands such as BMP-6, strongly bound to their growth factor receptors.

[0986] In one example, a (modified) GFR-binding compound, or functionalised bioactive carrier as defined herein may be a hair growth-promoting or a hair loss-regulator/modulator/inhibitor compound or functionalised bioactive carrier which has demonstrated the ability to enhance/promote hair growth and/or prevent and/or decrease or suppress hair loss in vitro, ex-vivo and/or in vivo.

[0987] In one aspect, the present disclosure provides a hair cosmetic or functional food composition comprising at least one (modified) GFR-binding compound, or at least one functionalised bioactive carrier, all as defined herein, in combination with at least one suitable hair-cosmetic carrier, preferably suitable for topical application.

[0988] Topical applications may be performed by any end-user by, for instance, applying and optionally rubbing the hair scalp with a hair cosmetic composition of the invention e.g. formulated as a shampoo or conditioner.

[0989] In one aspect, the present disclosure provides a hair medical (pharmaceutical, prophylactic, diagnostic, imaging, etc.) composition comprising at least one (modified) GFR-binding compound, or at least one functionalised bioactive carrier, all as defined herein, in combination with at least one suitable hair-medical carrier, preferably suitable for scalp injection application.

[0990] Scalp injection applications may preferably be performed by experienced end-users such as dermatologists and/or surgeons, preferably in clinical/medical settings in clean or sterile environment. Several subcutaneous injections may be carried out under the scalp where needed and renewed every few weeks, preferably months if required.

[0991] In one aspect, the present invention discloses a use of a (modified) GFR-binding compound, or a functionalised bioactive carrier as defined herein, in hair cosmetics or as a functional food. In one aspect, the present invention discloses a (modified) GFR-binding compound, or a functionalised bioactive carrier as defined herein, for use in a hair medical method.

[0992] In one aspect, the present disclosure provides a use of a (modified) GFR-binding compound, a functionalised bioactive carrier, or a hair cosmetic or functional food composition, all as defined herein, as a hair growth-promoting agent or hair-loss-preventing agent. For example, in certain embodiments, the (modified) GFR-binding compound, or functionalised bioactive carrier as defined herein, is used as active ingredient to promote (enhance, regulate, modulate, improve) hair growth and/or prevent or treat hair-loss and/or embellish hair in a hair cosmetic composition or a functional food composition. In one aspect, the present disclosure provides a (modified) GFR-binding compound, a functionalised bioactive carrier, or a hair medical composition, all as defined herein, as a hair growth-promoting agent or hair-loss-preventing agent. For example, in certain embodiments, the (modified) GFR-binding compound, or functionalised bioactive carrier as defined herein, is used as active ingredient to promote (enhance, regulate, modulate, improve) hair growth and/or prevent or treat hair-loss and/or embellish hair in a hair medical composition.

[0993] In one aspect, the present disclosure provides a use of a (modified) GFR-binding compound, a functionalised bioactive carrier, or a hair cosmetic composition, all as defined herein, in a method of hair cosmetic care, wherein said method of hair cosmetic care comprises the administration or the application of between about 0.0001 to about 100 □g per day, more specifically between about 0.001 to about 10 □g per day or between about 0.0001 to about 100 □g per day of said compound, bioactive carrier or composition.

[0994] In one example, a (modified) GFR-binding compound, functionalised bioactive carrier, or hair-cosmetic composition, all as defined herein, may be combined/mixed with mesenchymal stem cells and/or follicle progenitor cells prior to be administered to, contacted with, or implanted into a mammal (preferably a human) to promote hair growth and/or prevent and/or decrease or suppress hair-loss.

[0995] In one example, the administration comprises the oral administration of a tablet, capsule, pill, powder, sustained release formulations, solution or suspension containing said (modified) GFR-binding compound, functionalised bioactive carrier, or hair-cosmetic composition, all as defined herein.

[0996] Suitable as forms of hair cosmetic compositions for implementing embodiments of the invention include hair rinse, hair mask, shampoo, conditioner, hair spray, hair foam, hair mousse, hair gel, hair tonic, hair setting composition, end fluid, neutralizer for permanent waves, hair colorant and bleach or hot-oil treatment.

[0997] Suitable formulations for use in hair treatment include, for instance, the ones described in US patent application No. 2011/0312884 A1, which is hereby incorporated by reference.

[0998] In one example, said hair cosmetic use of the invention is a non-therapeutic hair cosmetic use.

[0999] Hair cosmetic compositions of the invention may comprise at least one other active agent of hair cosmetic interest especially the conventional agents for hair treatment compositions especially at least one of the following agents:
[1000] anionic surfactants such as soaps, alkylsulfonates, alkylbenzenesulfonates, olefinsulfonates, alkyl ether sulfonates, glycerol ether sulfonates, methyl ester sulfonates, sulfo fatty acids, alkyl sulfates, fatty alcohol ether sulfates, glycerol ether sulfates, fatty acid ether sulfates, hydroxyl mixed ether sulfates, monoglyceride (ether) sulfates, fatty acid amide (ether) sulfates, mono- and dialkyl sulfosuccinates, mono- and dialkyl sulfosuccinamates, sulfotriglycerides, amide soaps, ethercarboxylic acids and salts thereof, fatty acid isethionates, fatty acid sarcosinates, fatty acid taurides, N-acylaminoacids, such as, for example, acyl lactylates, acyl tartrates, acyl glutamates and acyl aspartates, alkyl oligoglucosidesulfat. Suitable soaps are e.g. alkali metal, alkaline earth metal and ammonium salts of fatty acids, such as potassium stearate. Suitable olefinsulfonates may be present as alkali metal, alkaline earth metal, ammonium, alkylammonium, alkanolammonium or glucammonium salts. Preferably, the olefinsulfonates are present as sodium salts. The hydrolyzed alpha-olefinsulfonation product, i.e. the alpha-olefinsulfonates, are composed of ca. 60% by weight of alkanesulfonates and ca. 40% by weight of hydroxyalkanesulfonat.es; of these, about 80 to 85% by weight are monosulfonates and 15 to 20% by weight are disulfonates. Preferred methyl ester sulfonates (MES) are obtained by sulfonation of the fatty acid methyl esters of plant or animal fats or oils. Preference is given to methyl ester sulfonates from plant fats and oils, e.g. from rapeseed oil, sunflower oil, soya oil, palm oil, coconut fat, etc. Preferred sarcosinates are sodium lauroyl sarcosinate or sodium stearoyl sarcosinate. Preferred protein fatty acid condensates are plant products based on wheat. Preferred alkyl phosphates are mono- and diphosphoric acid alkyl esters.
[1001] Fatty alcohols having preferably 8 to 30 carbon atoms, particularly preferably 10 to 22 carbon atoms, in particular 12 to 20 carbon atoms. The hydrocarbon radical of the fatty alcohols can in principle be linear or branched, saturated or unsaturated. Typical examples of fatty alcohols are caproic alcohol, caprylic alcohol, 2-ethylhexyl alcohol, capric alcohol, lauryl alcohol, isotridecyl alcohol, myristyl alcohol, cetyl alcohol, palmoleyl alcohol, stearyl alcohol, isostearyl alcohol, oleyl alcohol, elaidyl alcohol, petroselinyl alcohol, linolyl alcohol, linolenyl alcohol, elaeostearyl alcohol and mixtures thereof. Preferred mixtures of the fatty alcohols are based on technical-grade alcohol mixtures which are produced e.g. during the high-pressure hydrogenation of technical-grade methyl esters based on fats and oils or during the hydrogenation of aldehydes from the oxo synthesis or during the dimerization of unsaturated fatty alcohols.
[1002] phospholipids, nonionic surfactants, amphoteric surfactants, cationic surfactants and mixtures thereof. Phospholipids are phosphorus-containing amphiphilic lipids such as phosphatidylserines, sphingomyelins and plasmalogens. Also suitable are the so-called lysophospholipids in which a fatty acid radical has been separated off from the phospholipid molecule to give an OH group, e.g. with the help of a phospholipase. The nonionic surfactants include, for example: fatty alcohol polyoxyalkylene esters, for example lauryl alcohol polyoxyethylene acetate, alkyl polyoxyalkylene ethers which are derived from low molecular weight C1-C6-alkohols or from C7-C30-fatty alcohols. Here, the ether component can be derived from ethylene oxide units, propylene oxide units, 1,2-butylene oxide units, 1,4-butylene oxide units and random copolymers and block copolymers thereof. These include specifically fatty alcohol alkoxylates and oxo alcohol alkoxylates such as isotridecyl alcohol and oleyl alcohol polyoxyethylene ethers, alkylaryl alcohol polyoxyethylene ethers, e.g. octylphenol polyoxyethylene ethers, alkoxylated animal and/or plant fats and/or oils, for example corn oil ethoxylates, castor oil ethoxylates, tallow fat ethoxylates, glycerol esters, such as, for example, glycerol monostearate, alkylphenol alkoxylates, such as, for example, ethoxylated isooctyl-, octyl- or nonylphenol, tributylphenol polyoxyethylene ether, fatty amine alkoxylates, fatty acid amide and fatty acid diethanolamide alkoxylates, in particular ethoxylates thereof, sugar surfactants, sorbitol esters, such as, for example, sorbitan fatty acid esters (sorbitan monooleate, sorbitan tristearate), polyoxyethylene sorbitan fatty acid esters, alkyl polyglycosides, N-alkylgluconamides, alkyl methyl sulfoxides, alkyl dimethyl phosphine oxides, such as, for example, tetradecyl dimethyl phosphine oxide. Suitable amphoteric surfactants are e.g. alkylbetaines, alkylamidopropylbetaines, alkylsulfobetaines, alkyl glycinates, alkyl carboxyglycinates, alkyl amphoacetates or propionates, alkyl amphodiacetates or dipropionates. For example, it is possible to use cocodimethylsulfopropylbetaine, laurylbetaine, cocamidopropylbetaine, sodium cocamphopropionate or tetradecyldimethylamine oxide. The cationic surfactants include, for example, quaternized ammonium compounds, in particular alkyltrimethylammonium and dialkyldimethylammonium halides and alkyl sulfates, and pyridine and imidazoline derivatives, in particular alkylpyridinium halides. For example, behenyl or cetyltrimethylammonium chloride may suitably be used.
[1003] an antidandruff active ingredient. Suitable antidandruff active ingredients are piroctone olamine (1-hydroxy-4-methyl-6-(2,4,4-trimethylpentyl)-2-(1H)-pyridinonemonoethanolamine salt), crinipan AD (climbazole), ketoconazole, elubiol, selenium disulfide, sulfur colloidal, sulfur polyethylene glycol sorbitan monooleate, sulfur ricinol polyethoxylate, sulfur tar distillates, salicylic acid (or in combination with hexachlorophene), undecylenic acid monoethanolamide sulfosuccinate Na salt, lamepon UD (protein-undecylenic acid condensate), zinc pyrithione, aluminum pyrithione and magnesium pyrithione/dipyrithione magnesium sulfate.
[1004] proteins and protein derivatives, cosmetically active polymers, hair pigmentation agents, bleaches, keratin-hardening substances, antimicrobial active ingredients, light filter active ingredients, repellent active ingredients, hyperemic substances, antiphlogistics, keratinizing substances, antioxidative active ingredient and/or free radical active ingredients, sebostatic active ingredients, plant extracts, antierythematous or antiallergic active ingredients and mixtures thereof.
[1005] a cosmetically acceptable auxiliary such as oil bodies, fats, waxes, pearlescent waxes, propellants, consistency regulators, thickeners, superfatting agents, stabilizers, polymers, silicone compounds, UV stabilizers, antioxidants, film formers, swelling agents, hydrotropes, solubilizers, preservatives, perfume oils, dyes, etc. and mixtures thereof.

[1006] In one aspect, the invention discloses a hair cosmetic care or treatment method, for a subject having need thereof, said method comprising the application, preferably topical or scalp injection applications, or administration of a hair cosmetic composition according to the present invention.

[1007] In one aspect, the present invention discloses a hair cosmetic care or treatment method in which the (modified) GFR-binding compound, functionalised bioactive carrier, or hair cosmetic composition, all as defined herein, is used to stimulate/activate hair follicle stem cells.

[1008] In one example, the subject who has need of the hair cosmetic care of the invention is a subject chosen from a population having an average age of more than 30 years old, preferably of more than 40 years old, more preferably of more than 50 years old.

[1009] XX. Diagnostic Methods

[1010] In one aspect, the present disclosure provides a (modified) GFR-binding compound, a functionalised bioactive carrier or a medical or cosmetic composition as defined herein for use in a diagnostic method of a disease or condition which may require mesenchymal stem cells or progenitor cells (at any stage of differentiation thereof) to be differentiated.

[1011] In one aspect, the present disclosure provides a diagnostic method for diagnosing of a disease or condition which may require mesenchymal stem cells or progenitor cells (at any stage of differentiation thereof) to be differentiated comprising the provision of a (modified) GFR-binding compound or a pharmaceutical association, combination or composition as defined herein, and the contacting or administration of said GFR-binding compound or pharmaceutical association, combination or composition with a body part of a subject to be diagnosed.

[1012] A method for the diagnosis of a disease or condition which may require mesenchymal stem cells or progenitor cells (at any stage of differentiation thereof) to be differentiated in a patient, comprising obtaining a biological sample from a patient and apply fluorescent and/or radiolabeled (modified) GFR binding compounds, wherein high localisation of these compounds indicates a disease or condition which may require mesenchymal stem cells or progenitor cells (at any stage of differentiation thereof) to be differentiated in the patient.

[1013] XXI. Screening Methods

[1014] In one aspect, the present disclosure provides a screening method for selecting a peptide or a peptidomimetic having the ability to induce tissue regeneration and cell differentiation.

[1015] In one aspect, the present disclosure provides a screening method for selecting a peptide or peptidomimetic having the ability to induce tissue regeneration and cell differentiation, the method comprising the steps of (a) providing a molecular model of the following 3D structure coordinates of PEPREF and (b) identifying a candidate analog having a RMSD value of 2.45 Å or less. In particular example, step (b) is performed using the method of RMSD calculation as already defined herein

[1016] In certain embodiments, the method can be performed using a computer (i.e., in silico). In some embodiments, the method can include providing the three-dimensional models of a plurality of peptides or peptidomimetics (i.e., a library or database of peptides or peptidomimetics) and screening each compound individually. Thus, in one aspect, the method of screening peptides or peptidomimetics generally includes computationally evaluating the potential of a selected peptide(s) or peptidomimetic(s) to structurally match with the computational model of the three-dimensional structure of PEPREF. For example, this method can include the steps of (a) employing a computational approach to perform a fitting operation between the selected peptide(s) or peptidomimetic(s) and the three-dimensional structure of PEPREF; and (b) analysing the results of the fitting operation to quantify the three-dimensional structural similarities between the peptide(s) or peptidomimetic(s) and PEPREF using the RMSD procedure as defined herein.

[1017] In one aspect, the present disclosure provides a method of producing a peptide or peptidomimetic having the ability to induce tissue regeneration and cell differentiation, the method comprising the steps of (a) providing a molecular model of the following 3D structure coordinates of PEPREF; b) identifying a candidate analog having a RMSD as defined herein of 2.45 Å or less (in particular 2, more particularly 1.79); and (c) producing the candidate analog identified in step (b). In one particular example, said method further comprising the step of determining whether the compound produced in step (c) has a cell differentiation and tissue regeneration activity. In one particular example, steps (a) and (b) are performed by means of an electronic processor. In certain embodiments, step (a) comprises storing a representation of the atomic co-ordinates of PEPREF in a computer memory.

[1018] In one aspect, the present disclosure provides a method of producing a peptide or peptidomimetic having the ability to induce tissue regeneration and cell differentiation, the method comprising the steps of: (a) providing in a computer memory atomic X-ray crystallographic co-ordinates of PEPREF; (b) generating with a processor a molecular model having a three-dimensional shape of PEPREF; (c) identifying a candidate analog having a RMSD of 2.45 Å or less (in particular 2, more particularly 1.79); (d) producing the candidate analog identified in step (c); and (e) determining whether the candidate analog produced in step (d) induces tissue regeneration and cell differentiation. In one particular example, said method comprises the additional step of producing the peptide or peptidomimetic in a commercially useful quantity.

[1019] In one aspect, the present disclosure provides a computer system comprising: (a) a memory comprising atomic X-ray crystallographic coordinates of PEPREF; and (b) a processor in electrical communication with the memory; wherein the processor generates a molecular model having a three dimensional shape representative of PEPREF. In one particular example, said coordinates are stored on a computer readable diskette.

[1020] XXII. Kits

[1021] The present disclosure provides a variety of kits for conveniently and/or effectively carrying out methods and uses of the present invention. Typically, kits will comprise sufficient amounts and/or numbers of components to allow a user to perform multiple treatments of a subject(s) and/or to perform multiple experiments.

[1022] In one aspect, the present disclosure provides kits for pharmaceutical, dermatological, prophylactic, diagnostic, imaging or cosmetic functional association, combination or composition production, comprising at least one (modified) GFR-binding compound as defined herein, at least one bioactive carrier (such as a biomaterial or medical device) as defined herein, optionally a pharmaceutically, dermatologically, prophylactically, diagnostically, imaging or cosmetically acceptable excipient, carrier, vehicle or solvent, each and every one of them provided in an amount effective to produce a pharmaceutical, dermatological, prophylactic, diagnostic, imaging or cosmetic association to induce cell differentiation, promote tissue regeneration or protect a subject from a disease, disorder or condition as defined herein, when administered in-vitro, ex-vivo or in-vivo to a mesenchymal stem cell, progenitor cell (at any stage of differentiation thereof) or to a subject carrying such a cell, and packaging and instructions.

[1023] Suitable as solvents for use in kits of the invention include physiologically acceptable solvents, PBS, filtered and deionised water such as Milli-Q® water, alpha-MEM, DMEM and/or IMDM. All physiologically acceptable solvents suitable for implementing embodiments of the present invention are preferably deoxygenated before use.

[1024] In one example, said kit further comprises an administration device. In one example, said administration device is a dispensing device such as a syringe.

[1025] In one example, said kit comprises a first container containing a (modified) GFR-binding compound as defined herein and a second container containing a bioactive carrier such as a biomaterial or a medical device and a third container containing stem cells, preferably MSCs.

[1026] In one preferred example, a kit of the invention comprises (i) a first, preferably suitable, sterile, individual, container containing a (modified) GFR-binding compound as defined herein preferably in lyophilised form, (ii) a second, preferably suitable, sterile, individual, container containing a physiologically acceptable, sterile liquid (e.g. a solvent), (iii) a third, preferably suitable, sterile, individual, container containing a conventional biomaterial/medical device such as an orthopaedic or dental implant and, (iv) optionally, a fourth, preferably suitable, sterile, individual, container containing suitable stem cells, in particular adult stem cells or mesenchymal stem cells. In practice, said kit may be provided to an end-user (e.g. a surgeon). Said end-user may firstly pour the content of the second container into the first container, optionally provide a form of agitation to solubilise or suspend the (modified) GFR-binding compound of the invention in the physiologically acceptable, sterile liquid, then pour (or immerse) the resulting solution or suspension in the third container containing the conventional biomaterial/medical device (optionally with prior activation of said biomaterial/medical device if required), optionally followed by the contacting of the resulting functionalised biomaterial/medical device with the content of the fourth container containing the stem cells prior to placement onto or into a patient's body, preferably at a defect site.

[1027] Alternatively, a kit of the invention may comprise a first, preferably suitable, sterile, individual, container containing an already functionalised biomaterial/medical device e.g. a biomaterial/medical device functioanlised with a (modified) GFR-binding compound as defined herein, optionally in a physiologically acceptable liquid, and a second, preferably suitable, sterile, individual, container containing suitable stem cells, in particular adult stem cells or mesenchymal stem cells. In practice, an end-user such as a surgeon may apply the stem cells onto the coated biomaterial by pouring the content of the second container into the first containing (and optionally apply a form of agitation) prior to placement onto or into a patient's body, preferably at a defect site.

[1028] In one particular example, said kits of the invention may suitably be provided in the form of a sterile packaging.

[1029] For example, in certain embodiments, said kits of the invention comprises more than 2, between 2 and 25, between 2 and 15, or between 2 and 10 of (modified) GFR-binding compound as defined herein, and more than 2, between 2 and 25, between 2 and 15, or between 2 and 10 (modified) GFR-binding compound as defined herein.

[1030] In one example, each (modified) GFR-binding compound and each conventional or functionalised bioactive carrier is conditioned in distinct and separated compartments, in lyophilised form, in solution or in suspension in a pharmaceutically dermatologically, prophylactically, diagnostically, imaging or cosmetically acceptable excipient, carrier or vehicle.

[1031] In one aspect, the invention discloses kit-of-parts comprising a bioactive carrier and a (modified) GFR-binding compound both as defined herein for uses and methods as defined herein.

[1032] XXIII. Sequence Listing

[1033] Sequence Listing Free Text: Xaa may be, as specified, either a serine (Ser, S) or a cysteine (Cys, C). Examples of (modified) GFR-binding compounds as defined herein are listed in the appended sequence listing which forms an integral part of the present application.

[1034] (Modified) GFR-binding compounds, functionalised bioactive carriers and compositions, all as defined in the present disclosure, has been found to lead to multiple and distinct advantages in terms of cell differentiation induction and tissue regeneration.

[1035] As supported by the examples of the present application, (modified) GFR-binding compounds, functionalised bioactive carriers or compositions thereof, all as defined herein, display advantages over (modified) GFR-binding compounds, functionalised bioactive carrier or compositions that do not contain it, such as:
[1036] Enhanced and/or more practical and/or more efficient and/or more cost-effective and/or more adapted to the end-user needs and/or tissue regeneration in mammals, preferably humans;
[1037] Modifying and/or enhancing and/or modulating and/or promoting and/or activating bone and/or cartilage and/or vascular and/or muscle and/or neuronal and/or blood and/or retinal and/or organs such as kidneys and lung and/or ligament/tendon and/or hair follicle and/or skin and/or adipose, tissue regeneration;
[1038] Modifying and/or enhancing and/or modulating and/or promoting and/or activating embryonic patterning;
[1039] Modifying and/or enhancing and/or modulating and/or promoting and/or activating cellular migration and wound healing;
[1040] Modifying and/or enhancing and/or modulating and/or promoting and/or activating the closure of any type of living tissue;
[1041] Modifying and/or enhancing and/or modulating and/or promoting and/or activating female fertility;
[1042] Preventing and/or suppressing or avoiding or reducing tissue degeneration in mammals, preferably humans;
[1043] Preventing and/or suppressing or avoiding or reducing bone and/or cartilage and/or vascular and/or muscle and/or neuronal and/or blood and/or retinal and/or organs such as kidneys or lungs and/or ligament/tendon and/or hair follicle and/or skin and/or adipose, tissue degeneration;
[1044] Preventing and/or suppressing or avoiding or reducing embryonic mispatterning;
[1045] Preventing and/or suppressing or avoiding or reducing cellular immobilisation and wound formation and/or progression;
[1046] Preventing and/or suppressing or avoiding or reducing the misclosure of any type of living tissue;
[1047] Preventing and/or suppressing or avoiding or reducing female infertility;
[1048] Preventing and/or suppressing or avoiding or reducing hair-loss;
[1049] Preventing/treating alopecia areata, alopecia totalis, alopecia universalis, androgenic alopecia (male pattern baldness), telogen effluvium, anagen effluvium or chemotherapy-induced alopecia;
[1050] Modifying and/or enhancing and/or modulating and/or promoting and/or activating the osteogenicity, and/or the chondrogenecity, and/or the myogenecity, and/or the endothelization and vascularization ability, and/or hair growth ability, and/or the wound healing ability, and/or the skin repair ability, and/or the tissue defect closure ability, and/or lung tissue regeneration ability, and/or renal tissue regeneration ability, and/or the neuroregeneration ability, and/or the ligament/tendon regeneration ability, and/or the female fertility ability, of a biomaterial which may be useful in the manufacturing of medical devices;
[1051] Modifying and/or enhancing and/or activating anti-ageing/anti-wrinkle effects/properties in cosmetic products;
[1052] Modifying and/or enhancing and/or activating hair growth effects/properties in pharmaceutical or cosmetic products;
[1053] Modifying and/or enhancing and/or modulating and/or promoting and/or inducing and/or activating stem cells, preferably adult stem cells, more preferably mesenchymal stem cells, commitment and/or differentiation in a specific lineage of cells;
[1054] Modifying and/or enhancing and/or modulating and/or promoting and/or inducing and/or activating progenitor cells differentiation and/or maturation.
[1055] Obtaining/producing functional differentiated cells;
[1056] Obtaining/producing differentiated cells with modified and/or improved functionality and/or physiological activity;
[1057] Increasing amount of osteoblast cells whilst (highly) reducing bone resorption activity;
[1058] Increasing bone mineralization speed, rate and surface;
[1059] Having the ability to decouple bone resorption from bone formation;
[1060] Achieving efficient bone strengthening in osteoporosis patients;
[1061] Reduced or low or substantially inexistent organ toxicity, in particular in the liver.

[1062] For example, in certain embodiments, (modified) GFR-binding compounds, functionalised bioactive carriers, or compositions according to the present disclosure in which PEP1 is a peptide selected from the group consisting of SAIS (SEQ ID NO: 6360), NAIS (SEQ ID NO: 6357), SATS (SEQ ID NO: 6361) and SPIS (SEQ ID NO: 6364), and in which the RMSD is 2.45 Å or less, have been found to lead to unexpectedly fast and qualitatively and quantitatively important osteoinduction, producing highly functional differentiated cells.

[1063] For example, in certain embodiments, (modified) GFR-binding compounds, functionalised bioactive carriers, or compositions according to the present disclosure in which PEP1 is a peptide selected from the group consisting of SAIS (SEQ ID NO: 6360), NAIS (SEQ ID NO: 6357), SPIS (SEQ ID NO: 6364), EPLP (SEQ ID NO: 6354), and EPLT (SEQ ID NO: 6355), and in which the RMSD is 2.45 Å or less, have been found to lead to unexpectedly fast and qualitatively and quantitatively important chondroinduction, producing highly functional differentiated cells.

[1064] For example, in certain embodiments, (modified) GFR-binding compounds, functionalised bioactive carriers, or compositions according to the present disclosure in which PEP1 is a peptide selected from the group consisting of SNIT (SEQ ID NO: 6362), RPVQ (SEQ ID NO: 6358) and RSVK (SEQ ID NO: 6359), and in which the RMSD is 2.45 Å or less, have been found to lead to unexpectedly fast and qualitatively and quantitatively important vascular tissue induction, producing highly functional differentiated cells.

[1065] For example, in certain embodiments, (modified) GFR-binding compounds, functionalised bioactive carriers, or compositions according to the present disclosure in which PEP1 is selected from the group consisting of NAIS (SEQ ID NO: 6357), SPIS (SEQ ID NO: 6364) and EPIS (SEQ ID NO: 6353), and in which the RMSD is 2.45 Å or less, have been found to lead to unexpectedly fast and qualitatively and quantitatively important neuronal induction, producing highly functional differentiated cells.

[1066] For example, in certain embodiments, (modified) GFR-binding compounds, functionalised bioactive carriers, or compositions according to the present disclosure in which PEP1 is SPIN (SEQ ID NO: 6363), and in which the RMSD is 2.45 Å or less, have been found to lead to unexpectedly fast and qualitatively and quantitatively important eye-retina cells induction, producing highly functional differentiated cells.

[1067] For example, in certain embodiments, (modified) GFR-binding compounds, functionalised bioactive carriers, or compositions according to the present disclosure in which PEP1 is SPIN (SEQ ID NO: 6363), and in which the RMSD is 2.45 Å or less, have been found to lead to unexpectedly fast and qualitatively and quantitatively important renal cells induction, producing highly functional differentiated cells.

[1068] For example, in certain embodiments, (modified) GFR-binding compounds, functionalised bioactive carriers, or compositions according to the present disclosure in which PEP1 is a peptide selected from the group consisting of NAIS (SEQ ID NO: 6357), SPIS (SEQ ID NO: 6364), EPLP (SEQ ID NO: 6354) and EPLT (SEQ ID NO: 6355), and in which the RMSD is 2.45 Å or less, have been found to lead to unexpectedly fast and qualitatively and quantitatively important tenocytes and/or fibrous cells induction, producing highly functional differentiated cells.

[1069] For example, in certain embodiments, (modified) GFR-binding compounds, functionalised bioactive carriers, or compositions according to the present disclosure in which PEP1 is selected from the group consisting of SNIT (SEQ ID NO: 6362), RPVQ (SEQ ID NO: 6358) and RSVK (SEQ ID NO: 6359), and in which the RMSD is 2.45 Å or less, have been found to lead to unexpectedly fast and qualitatively and quantitatively important wound healing induction, producing highly functional differentiated cells.

[1070] For example, in certain embodiments, (modified) GFR-binding compounds, functionalised bioactive carriers, or compositions according to the present disclosure in which PEP1 is a peptide selected from the group consisting of EPLP (SEQ ID NO: 6354), EPLT (SEQ ID NO: 6355), RSVK (SEQ ID NO: 6359) and RPVQ (SEQ ID NO: 6358), and in which the RMSD is 2.45 Å or less, have been found to lead to unexpectedly fast and qualitatively and quantitatively important skin cells induction, producing highly functional differentiated cells.

[1071] For example, in certain embodiments, (modified) GFR-binding compounds, functionalised bioactive carriers, or compositions according to the present disclosure in which PEP1 is SSLS (SEQ ID NO: 6365), and in which the RMSD is 2.45 Å or less, have been found to lead to unexpectedly fast and qualitatively and quantitatively important hair follicle cells induction, producing highly functional differentiated cells.

[1072] For example, in certain embodiments, (modified) GFR-binding compounds, functionalised bioactive carriers, or compositions according to the present disclosure in which PEP1 is NAIS (SEQ ID NO: 6357), and in which the RMSD is 2.45 Å or less, have been found to lead to unexpectedly fast and qualitatively and quantitatively important ovarian cells induction, producing highly functional differentiated cells.

[1073] For example, in certain embodiments, (modified) GFR-binding compounds, functionalised bioactive carriers, or compositions according to the present disclosure in which PEP1 is selected from the group consisting of NAIS (SEQ ID NO: 6357), SATS (SEQ ID NO: 6361), SPIS (SEQ ID NO: 6364), EPIS (SEQ ID NO: 6353) and SPIN (SEQ ID NO: 6363), and in which the RMSD is 2.45 Å or less, have been found to lead to unexpectedly fast and qualitatively and quantitatively important lung cells induction, producing highly functional differentiated cells.

[1074] For example, in certain embodiments, (modified) GFR-binding compounds, functionalised bioactive carriers, or compositions according to the present disclosure in which PEP1 is RSVK (SEQ ID NO: 6359) or RPVQ (SEQ ID NO: 6358), and in which the RMSD is 2.45 Å or less, have been found to lead to unexpectedly fast and qualitatively and quantitatively important muscle cells induction, producing highly functional differentiated cells.

[1075] For example, in certain embodiments, (modified) GFR-binding compounds, functionalised bioactive carriers, or compositions according to the present disclosure in which PEP1 is SNIT (SEQ ID NO: 6362), and in which the RMSD is 2.45 Å or less, have been found to lead to unexpectedly fast and qualitatively and quantitatively important blood cells induction, producing highly functional differentiated cells.

[1076] For example, in certain embodiments, (modified) GFR-binding compounds, functionalised bioactive carriers, or compositions according to the present disclosure in which PEP1 is SAIS (SEQ ID NO: 6360) or NAIS (SEQ ID NO: 6357), and in which the RMSD is 2.45 Å or less, have been found to lead to unexpectedly fast and qualitatively and quantitatively important adipocytes induction, producing highly functional differentiated cells.

[1077] For example, in certain embodiments, microenvironments comprising a plurality of structurally distinct/different (modified) GFR-binding compounds, functionalised bioactive carriers, or compositions according to the present disclosure in which each PEP1 is a peptide which may be selected from the group consisting of SAIS (SEQ ID NO: 6360), SSLS (SEQ ID NO: 6365), NAIS (SEQ ID NO: 6357), SATS (SEQ ID NO: 6361), SPIS (SEQ ID NO: 6364), EPIS (SEQ ID NO: 6353), SPIN (SEQ ID NO: 6363), KPLS (SEQ ID NO: 6356), EPLP (SEQ ID NO: 6354), EPLT (SEQ ID NO: 6355), SNIT (SEQ ID NO: 6362), RSVK (SEQ ID NO: 6359) and RPVQ (SEQ ID NO: 6358), and in which the RMSD is 2.45 Å or less, have been found to lead to unexpectedly fast and qualitatively and quantitatively important tissue closure induction, producing highly functional differentiated cells.

[1078] Accordingly, it is possible to achieve tissue (bone, cartilage, vascular, endothelial, blood, neuronal, eye-retina, kidneys, lung, adipose, ligament, tendon, hair follicle, skin, ovary, etc.) regeneration using e.g. orthopedic, dental implants, matrix injections or administrable compositions, efficiently and rapidly thus reducing the costs associated with such treatments, improving and accelerating tissue healing and patient recovery.

[1079] In addition, it has been found that using the compounds, bioactive carier and compositions of the present disclosure also permits a quasi-complete or complete control over the final chemical structure of the compounds, bioactive carier and compositions of the present disclosure, thereby avoiding any unwanted (e.g. post-translational) modifications and unpredicted short half-life and quick metabolization.

[1080] Remarkably, it has also been found that using the compounds, bioactive carier and compositions of the present disclosure allows for reduction (in most cases, important reduction) of the administered doses to provide a beneficial treatment to a patient in comparison with known technologies, thus decreasing or eliminating the risks of immune responses and reduce or eliminate drug/treatment toxicity.

[1081] It is another aspect of the present invention to solve the technical problem of providing a tissue regeneration environment/system being completely or at least partially devoid of one or more, preferably a plurality of the disadvantages of known treatments.

[1082] All combinations of any of the above-mentioned features described in all above part of the present description are specifically contemplated by the Applicant to be within the scope of the present invention unless contradictory in context. Examples of such combinations are detailed throughout the present description.

[1083] Further embodiments and advantages will become apparent to a skilled reader in light of the examples provided below.

### Examples

[1084] Disclosed and described, it is to be understood that this invention is not limited to the particular examples, process steps, and materials disclosed herein as such process steps and materials may vary somewhat. It is also to be understood that the terminology used herein is used for the purpose of describing particular embodiments only and not intended to be limiting since the scope of the present invention will be limited only by the appended claims and equivalents thereof.

[1085] The following Examples are representative of techniques employed by the inventor in carrying out aspects of the present invention. It should be appreciated that while these techniques are exemplary of preferred embodiments for the practice of the invention, those of skill in the art, in light of the present disclosure, will recognize that numerous modifications can be made without departing from the spirit and intended scope of the invention.

[1086] The following starting materials and reagents were used:
[1087] Apatite ceramics (also called apatite or ceramic in the present invention) were synthetized as described in Mater Res. 2004; 7(4): 625-630.
[1088] Titanium was obtained from Goodfellow®.
[1089] Hydrogel (poly(acrylamide-co-acrylic acid) gel) was synthetized as described in Langmuir 2011; 27(22):13635-42.
[1090] PEEK was obtained from Goodfellow®.
[1091] PET (Poly(ethylene terephthtalate) was obtained from Goodfellow®.
[1092] Type-I collagen sponge was obtained from Sigma®.
[1093] Hexane was obtained from Sigma®.
[1094] 3-succinimidyl-3-maleimidopropionate (SMP) was obtained from Sigma®.
[1095] DMF was obtained from Sigma®.
[1096] PBS 1X was obtained from Gibco®.
[1097] 3-(ethoxydimethylsilyl)propylamine was obtained from Sigma®.
[1098] Ammonium persulfate was obtained from Biorad®.
[1099] N,N,N′,N′-tetramethylethylenediamine was obtained from Aldrich®.
[1100] Acrylamid was obtained from Merck®.
[1101] Acrylic acid was obtained from Merck®.
[1102] N,N-methylene-bis-acrylamide was obtained from Merck®.
[1103] NaOH was obtained from Aldrich®.
[1104] N,N,N′,N′-tetramethylethylenediamine was obtained from Aldrich®.
[1105] Dimethylaminopropyl-3-ethylcarbodiimide hydrochloride was obtained from Aldrich®.
[1106] N-hydroxysuccinimide was obtained from Aldrich®.
[1107] 2-(N-morpholino)-ethane sulfonic acid was obtained from Aldrich®.
[1108] MilliQ water: is water characterised in terms of resistivity (typically 18.2 MΩ·cm at 25° C.).
[1109] Low glucose Dulbecco's Modified Eagle Medium (DMEM) was obtained from Invitrogen®
[1110] Minimum Essential Medium Eagle without ascorbic acid (αMEM) was obtained from Invitrogen®.
[1111] All of the cell culture experiments were carried out without any serum in the medium for the first 8 hours of culture.
[1112] Osteoblast progenitors or precursor osteoblasts: MC3T3-E1 cells were obtained from ATCC®. These cells were cultured in Alpha-MEM medium supplemented with 10% fetal calf serum (FCS) and 1% penicillin/streptomycin. All cells were used at a low passage number (passage 7), were subconfluently cultured and were seeded at 10⁴cells/cm² for the purpose of the experiments.
[1113] Human bone marrow Mesenchymal Stem Cells (hMSCs) were obtained from Lonza®. These cells were cultured in Alpha-MEM supplemented with 10% (v/v) FBS and 1% penicillin/streptomycin and incubated in a humidified atmosphere containing 5% (v/v) CO₂ at 37° C. All cells were used at a low passage number (passage 2 to 4), were subconfluently cultured and were seeded at 10⁴cells/cm² for the purpose of the experiments.
[1114] Human adipose Mesenchymal Stem Cells (haMSCs) were obtained from Lonza®. These cells were cultured in Alpha-MEM supplemented with 10% (v/v) FBS and 1% penicillin/streptomycin and incubated in a humidified atmosphere containing 5% (v/v) CO₂ at 37° C. All cells were used at a low passage number (passage 3 to 4), were subconfluently cultured and were seeded at 10⁴cells/cm² for the purpose of the experiments.
[1115] Mouse Hair Follicle Stem Cells were isolated and cultured as described in Methods Mol Biol. 2010; 585:401-20.
[1116] Neuron cells are Neuronal Schwann Cells obtained from ATCC®. These cells were cultured in Dulbecco's Modified Eagle's Medium supplemented with 10% (v/v) FBS and 1% penicillin/streptomycin and incubated in a humidified atmosphere containing 5% (v/v) CO₂ at 37° C. All cells were used at a low passage number (passage 6-8), were subconfluently cultured and were seeded at 10⁴cells/cm² for the purpose of the experiments.
[1117] Human umbilical-vein endothelial cells (HUVECs) were purchased from Promocell®. HUVECs were isolated and grown on gelatin coated culture flasks in a complete HUVEC culture medium (IMDM (Invitrogen, France) supplemented with 20% (v/v) fetal bovine serum (FBS) (PAA, France) and 0.4% (v/v) EC growth supplement/heparin kit (Promocell, France)). Cells were subcultured by using trypsin/EDTA (Invitrogen, France) and maintained in a humidified atmosphere containing 5% CO₂ at 37° C. These cells were used at a passage number 3 to 5 for the purpose of the experiments. HUVECs were seeded on each surface at a density of 50 000 cells/cm².
[1118] Human Mammary Epithelial Cells (HMEC) were obtained from Lonza®. These cells were cultured in Clonetics™ MEGM™ Mammary Epithelial Cell Growth Medium.
[1119] Hematopoietic stem (Bone marrow CD34+ cells, Lonza). These cells were cultured on HPGM™ Hematopoietic Growth Medium in serum-free culturing.
[1120] CMFDA is a Cell Tracker Green obtained from Invitrogen®.
[1121] DAPI was obtained from Sigma®.
[1122] Fetal bovine serum (FBS) was obtained from Gibco®.
[1123] Penicillin/streptomycin was obtained from Invitrogen®.
[1124] The AlamarBlue® assay was obtained from Molecular Probes®.
[1125] Runx2 antibody was obtained from Abcam®.
[1126] Osterix antibody was obtained from Santa Cruz Biotechnology®.
[1127] Osteopontin antibody was obtained from Abcam®,
[1128] Stro-1 antibody was obtained from Abcam®,
[1129] Sox2 antibody was obtained from Santa Cruz Biotechnology®.
[1130] Sox9 antibody was obtained from Santa Cruz Biotechnology®.
[1131] BMP-6 antibody was obtained from Abcam®,
[1132] CD31 (PECAM-1) antibody was obtained from Invitrogen®,
[1133] Primers for GAP 43: 5′-AAGCTACCACTGATAACTCGCC-3′ (SEQ ID NO: 6613) (Forward) and 5′-CTTCTTTACCCTCATCCTGTCG-3′ (SEQ ID NO: 6614) (Reverse) were obtained from Invitrogen®.
[1134] Primers for Aggrecan: 5′-CACTGTTACCGCCACTTCCC-3′ (SEQ ID NO: 6615) (Forward) and 5′-ACCAGCGGAAGTCCCCTTCG-3′ (SEQ ID NO: 6616) (Reverse) were obtained from Invitrogen®.
[1135] Primers for COMP: 5′-GCTCTGTGGCATACAGGAGA-3′ (SEQ ID NO: 6617) (Forward) and 5′-CATAGAATCGCACCCTGATG-3′ (SEQ ID NO: 6618) were obtained from Invitrogen®.
[1136] Primers for Runx2: 5′-GACGTGCCCAGGCGTATTTC-3′ (SEQ ID NO: 6619) (Forward) and 5′-AAGTCTGGGGTCCGTCAAGG-3′ (SEQ ID NO: 6620) (Reverse) were obtained from Invitrogen®.
[1137] Primers for HPRT: 5′-GCAGTACAGCCCCAAAATGG-3′ (SEQ ID NO: 6621) (Forward) and 5′-ACAAAGTCCGGCCTGTATCCAA-3′ (SEQ ID NO: 6622) (Reverse) were obtained from Invitrogen®.
[1138] All peptides were synthetized using conventional solution and/or solid phase peptide synthesis methods.
[1139] All experiments were carried out with a concentration of compounds of the invention of 400 ng/mL. When cell culture duration extended beyond 24 h, a further 400 ng/mL solution of compounds of the invention was added every 24 h.
[1140] In all the following exemplified peptide sequences, X1 (or Xaa) is a serine (Ser, S).

[1141] The following general methods were used:
[1142] X-ray photoelectron spectroscopy:

[1143] For X-ray photoelectron spectroscopy, AVG Scientific ESCALAB photoelectron spectrometer was used for the surface analysis with a non-monochromatized MgK 1253.6 eV source of 100 W. The area of the analytical X-ray spot on the sample surface was about 200 μm². A 45° insert angle that corresponds to about 5 nm of analyzed depth was used. A flood gun was used for charge compensation. Acquisition of high resolution spectra was performed at constant pass energy of 20 eV.
[1144] Optical Profilometry probing:

[1145] The surface profiler system is a non-contact optical profiler that measures a wide range of surface heights.

[1146] The vertical scanning interferometry mode allows for the measurement of rough surfaces and steps of up to several micrometers. This mode was used in order to measure the thickness of the extracellular matrix produced by the cells. First, after 24 h of culture, the cells were fixed with paraformaldehyde in PBS (4%) for 30 minutes at 4° C. and the samples were dehydrated in increasing concentrations of ethanol (30, 70, 80, 90, 95 and 100%) and critical-point dried. To evaluate the extent of the newly synthesized extracellular matrix, a spatula was used to scratch the surface of the materials. The samples were then metallized for 10 sec with gold or titanium before being analyzed. This procedure did not affect the cell shape and dimensions.
[1147] Immunostaining:

[1148] The cells were first fixed for 20 min with 4% paraformaldehyde/PBS at 4° C. After fixation, the cells were permeabilized in PBS containing 1% Triton X-100 for 15 min. Runx2, Osterix, Stro-1, Vinculin, Phalloidin, Osteopontin, Sox2, Sox9 antibodies were visualized by treating the cells with 1% (v/v) specific monoclonal antibodies for 1 hour at 37° C. Then the samples were incubated with Alexa fluor® 568 or 647 (F(ab′)2 fragment of IgG(H+L)) during 30 min at room temperature. The cell nuclei were counterstained in 20 ng/mL DAPI for 10 min at room temperature.
[1149] Quantification of positive contact numbers and areas:

[1150] For this type of quantification the freeware image analysis ImageJ® software was used. The raw image was first converted to an 8-bit file, and then the unsharp mask feature was used (settings 1:0.2) to remove the image background (rolling ball radius 10). After smoothing, the resulting image, which appears similar to the original photomicrograph but with minimal background, was then converted to a binary image by setting a threshold. Threshold values were determined empirically by selecting a setting, which gave the most accurate binary image for a subset of randomly selected photomicrographs. The cell area was determined by manual delineation on raw fluorescent images. Total contact area and mean contact area per cell were calculated by “analyse particules” in ImageJ®. A minimum of 30 cells per condition were analyzed. Stro-1, CD-34+, and CD-105 expressions were determined using this procedure.
[1151] Quantitative Real Time Polymerase Chain Reaction (Q-PCR):

[1152] Total RNA was extracted by using the RNeasy total RNA kit (Qiagen®) according to the manufacturer's instructions. Purified total RNA was used as a template in order to make cDNA by a reverse transcription reaction (Gibco BrI®) with random primers (Invitrogen®). The cDNA was then used as a template for a real-time PCR amplification in the presence of SYBR green reagents (Bio-Rad®) by using a thermocycler (iCycler, Biorad®). Data were analyzed with the iCycler IQ™® software and compared by the ΔΔCt method. Briefly, the mean Ct value of the target gene was normalized to its averaged Ct values of the housekeeping gene (HPRT) to give a ΔCt value, which was then normalized to a control sample to obtain a ΔΔCt value. The results were obtained from two series of experiments performed in a triplicate.
[1153] Semi-quantitative RT-PCR:

[1154] Total RNA was extracted by using the RNeasy Mini Kit (Qiagen) and 1 mg RNA was used for cDNA synthesis with AMV kit (Invitrogen®) according to the manufacturer' instructions. Semi-quantitative reverse transcriptase-polymerase chain reaction (RT-PCR) was performed with Taq DNA Polymerase (Invitrogen®) in a thermocycler (Bio-Rad®). The cDNA input was normalized to glyceraldehyde-3-phosphate dehydrogenase (HPRT). The PCR products were analyzed on 2% agarose gels. For the Aggrecan gene, the PCR bands were densitometrically quantified by using the BioCapt software (Vilber). Values were normalized to HPRT, and results were reported as relative gene expression.
[1155] General procedure used for the covalent depositing of the GFR-binding compounds as defined herein onto biomaterials

[1156] Method 1: Hydrogel Surface Preparation and Covalent Grafting (Such as PLLA)

[1157] The preparation of poly(acrylamide-co-acrylic acid) gel substrates was shown as an example in order to illustrate the effect of the GFR-binding compounds as defined herein. The synthesis of hydrogels is based on acrylamide and acrylic acid by polymerization in the presence of N,N′-methylene-bis-acrylamide as a cross-linker in an aqueous medium. Practically, 0.3 g of acrylamide (AM, Merck) has been dissolved in 5 mL of PBS 1X (Invitrogen). 30 μL of acrylic acid (AA, Merck), then ×g (function as the stiffness) of N,N-methylene-bis-acrylamide was added under stirring. Then, a NaOH solution (1M, Aldrich) was added dropwise to reach a pH 8. The formation of hydrogel proceeded via free radical polymerization. The starting solution was degassed during 10 min by bubbling nitrogen in order to remove the oxygen which acts as an inhibitor for the free radical polymerization process. Nitrogen atmosphere was maintained above the solution and 50 μL (corresponding to 1/100 of the total volume) of Ammonium persulfate 10% (Biorad), (free radical initiator) and then 5 μL (corresponding to 1/1000 of total volume) of N,N,N′,N′-tetramethylethylenediamine (catalyst, Aldrich) were added. The polymerizing solution was vortexed gently. Promptly, 0.5 mL of this gel solution was placed before polymerization on a glass slide and another slide was placed on the top of this structure. Reactivity ratios calculated by the Finemann-Ross and Kelen-Tudos methods showed that the copolymers were random with a reactivity ratio of rAM=3.76 and rAA=0.28. The materials obtained here have various stiffnesses ranging from 0.1 to 600 kPa. Chemical functionalization with GFR-binding compounds as defined herein of poly(acrylamide-co-acrylic acid) gel substrates was performed via the —COOH (carboxyl) functions of their surface. Hydrogels were immersed in a solution of dimethylaminopropyl-3-ethylcarbodiimide hydrochloride (EDC, 0.2 M)+N-hydroxysuccinimide (NHS, 0.1 M) in 2-(N-morpholino)-ethane sulfonic acid (MES buffer, 0.1 M in MilliQ water) overnight at room temperature without stirring and then rinsed in MilliQ water (50 mL during 30 min). The immobilization of the GFR-binding compounds as defined herein was achieved in a solution of peptides/PBS 1X (C=10⁻³ M) for 18 hours at room temperature by using an orbital shaker. After grafting, the modified hydrogels were rinsed with PBS 1X for one week.

[1158] Method 2: Solid Material Covalent Modification (Such as Ceramics or Titaniums)

[1159] The material modifications were performed in a controlled Atmosphere (Ar Atmosphere, Glove Box). The strategy for covalent modification of GFR-binding compounds as defined herein involved (1) grafting of (3-aminopropyl)-triéthoxysilane (concentration of 1×10⁻²M, 4 hours) onto the surface of the biopolymer, (2) substitution of the terminal amine by a hetero-bifunctional cross-linker, a 3-succinimidyl-3-maleimidopropionate (concentration of 1×10−3M, 4 hours) in order to (3) reacting of the “outer” maleimide group with the GFR-binding compounds as defined herein (concentration of 1×10⁻³M, 18 hours) via a thiol group present in the terminal cysteine. After grafting, the modified materials were rinsed with PBS 1X buffer for 5 days.

[1160] Method 3: Polymer Grafted by Peptides (Such as PET or PEEK)

[1161] The polymer used in this study is poly(ethylene terephthalate) (PET). The polymers were first treated in order to create—COOH (carboxyl) functions on the PET surfaces from —OH (hydroxyl) functions. Next, the PET-COOH samples were immersed in a solution of dimethylaminopropyl-3-ethylcarbodiimide hydrochloride (EDC, 0.2 M)+N-hydroxysuccinimide (NHS, 0.1 M) in 2-(N-morpholino)-ethanesulfonic acid (MES) buffer (0.1 M in MilliQ water) and the samples were rinsed in MilliQ water (50 mL for 30 min). The same protocol was used for all the polymers containing —OH (hydroxyl) functions on their extreme surface. Finally, the covalent immobilization of the peptides was achieved by using a solution of peptides/1X PBS (C=10⁻³ M) incubated for 18 hours at room temperature. After grafting, the materials were rinsed in MilliQ water (100 ml) for 1 week.

### Example 1: Covalent Depositing of GFR-Binding Compounds as Defined Herein onto Conventional Titanium

[1162] The material modifications were performed in a Specific Atmosphere (Ar Atmosphere, Glove Box). The strategy for the covalent peptide immobilization involved (1) the grafting of (3-aminopropyl)-triethoxysilane (concentration of 1×10⁻²M, 4 hours) onto the surface of the implant, (2) substitution of the terminal amine by a hetero-bifunctional cross-linker: a 3-succinimidyl-3-maleimidopropionate (concentration of 1×10⁻³M, 4 hours) in order to (3) react the “outer” maleimide group with an osteogenic peptide (concentration of 1×10⁻³M, 24 hours) via a thiol group present in the terminal cysteine. After covalent immobilization, the modified materials were rinsed with Phosphate Buffered Saline (PBS 1X) buffer for 5 days. PBS is a buffer solution commonly used in the biological research. It is a water-based salt solution containing sodium phosphate, sodium chloride and, in some formulations, potassium chloride and potassium phosphate. The osmolarity and ion concentrations of the solutions match those of the human body (isotonic) and are thus physiological and non-toxic to the cells.

[1163] The following peptides were covalently deposited via the thiol group present in the terminal cysteine that was added to the GFR-binding compounds to allow covalent bonding to the surface of the biomaterial:

SEQ ID NO: 1
CGSAGPSSVPTKMSAISMLYL
SEQ ID NO: 2
CAAPASSSVPTRLSAISMLYL
SEQ ID NO: 3
CSTPPTSSVPTRLSAISMLYL
SEQ ID NO: 4
CNDEGLESAPTEENAISVLYF
SEQ ID NO: 5
CNDEGLESAPTGQNAISVLYF
SEQ ID NO: 6
CKIPKASSVPTELSATSVLYY
SEQ ID NO: 9
CHVTKPTSVPEKLSSLSILFF
SEQ ID NO: 10
CKVGKASSVSQKLEPLTILYY
SEQ ID NO: 11
CRNVQSRPTQVQLNAISVLYF
SEQ ID NO: 12
CHVPKPSSAPTKLSAISMLYL
SEQ ID NO: 13
CKVGKASSVPTKLEPLTILYY
SEQ ID NO: 14
CRNVQSRPTQVQLSAISMLYL
SEQ ID NO: 15
CASASPSSVSQDLSAISMLYL
SEQ ID NO: 16
CHVPKPSSVPTKLSPISVLYK
SEQ ID NO: 17
CNDEGLESVPTGQNAISVLYF
SEQ ID NO: 18
CTVPKPSSAPTQLSAISMLYL
SEQ ID NO: 19
CAVPKASSAPTKLSAISMLYL
SEQ ID NO: 20
CKVGKASSVPTKLSAISMLYL
SEQ ID NO: 43
CRVPSTSSVPAKTSPISILYI
SEQ ID NO: 44
CASAAPSSVPAALSPISILYI
SEQ ID NO: 45
CNDEGLESVPAEESPISILYI
SEQ ID NO: 46
CVPAGQSPISILYI
SEQ ID NO: 47
CNDEGLESVPAEESPISILYI
SEQ ID NO: 48
CVPAEESPISILYI
SEQ ID NO: 49
CGIPEPSSVPAKMSPISILYI

[1164] The biomaterial surface was characterized by covalently immobilizing fluorescent peptides (Herein SEQ ID NO: 1 coupled to fluorescein isothiocyanate (FITC), FIG. 1) and X-ray photoelectron spectroscopy (Table 1, 2 and 3). The X-ray photoelectron spectroscopy was performed as described in the Methods section. The results presented in Table 1 were obtained for a titanium alloy material (Ti6A14V metal alloy pellets) covalently modified with SEQ ID NO: 2 to 6.

TABLE 1

| Name | At. % C1s | At. % N1s |
|---|---|---|
| Titanium | 29.07 | no |
| | | detection |
| Titanium grafted covalently with SEQ ID NO: 2 | 42.68 | 3.98 |
| Titanium grafted covalently with SEQ ID NO: 3 | 43.22 | 5.07 |
| Titanium grafted covalently with SEQ ID NO: 4 | 40.85 | 4.18 |
| Titanium grafted covalently with SEQ ID NO: 5 | 40.51 | 5.39 |
| Titanium grafted covalently with SEQ ID NO: 6 | 43.78 | 4.09 |

### Example 2: Covalent Depositing of GFR-Binding Compounds as Defined Herein onto Conventional PEEK Material

[1165] A polyetheretherketone (PEEK) was treated with ethylene diamine (NH₂═NH₂) to create—NH₂ (amine) functions on the PEEK surfaces from ketone (═O) functions. Next, the PEEK-NH₂ samples were immersed in a solution of a hetero-bifunctional cross-linker: a 3-succinimidyl-3-maleimidopropionate (concentration of 1×10−3M, 4 hours) in order to react the “outer” maleimide group with the GFR-binding compounds as defined herein (concentration of 1×10⁻³M, 24 hours) via a thiol group present in the terminal cysteine. After grafting, the modified materials were rinsed with PBS 1X for 5 days.

[1166] The surfaces were characterized by grafting fluorescent peptides and by other methods such as X-ray photoelectron spectroscopy. The X-ray photoelectron spectroscopy was performed as described in the Methods section.

[1167] The results presented in Table 2 were obtained by using a PEEK covalently modified with SEQ ID NO: 7.

TABLE 2

| Name | At. % C1s | At. % N1s |
|---|---|---|
| PEEK | 86.56 | no detection |
| PEEK grafted covalently with SEQ ID NO: 7 | 70.79 | 4.59 |

### Example 3: Covalent Depositing of GFR-Binding Compounds as Defined Herein onto PLLA

[1168] PLLA (Polylactic acid) was immersed in a solution of dimethylaminopropyl)-3-ethylcarbodiimide hydrochloride (EDC, 0.2 M)+N-hydroxysuccinimide (NHS, 0.1 M) in (2-(N-morpholino)-ethanesulfonic acid (MES buffer, 0.1 M in MilliQ water) and then rinsed in MilliQ water (during 30 min). The covalent immobilization was performed in a solution of GFR-binding compounds as defined herein SEQ ID NO: 8 (concentration of 1×10−3M, 18 hours, room temperature). After the covalent immobilization, the modified materials were rinsed with PBS 1X for 5 days.

[1169] The surfaces were characterized by using fluorescent peptides and by using other methods such as X-ray photoelectron spectroscopy. The X-ray photoelectron spectroscopy was performed as described in the Methods section.

[1170] The results presented in Table 3 were obtained by using a PLLA covalently modified with SEQ ID NO: 8.

TABLE 3

| Name | At. % C1s | At. % N1s |
|---|---|---|
| PLLA | 69.02 | no detection |
| PLLA grafted covalently with SEQ ID NO: 8 | 71.38 | 5.21 |

### Example 4: Proliferation of Progenitor Bone Cells

[1171] The effect of the GFR-binding compounds as defined herein (SEQ ID NO: 9 to 14) of the invention on the proliferation of osteoblast progenitors (MC3T3-E1 cells, ATCC®) was investigated. The stimulatory effect of apatite ceramics, covalently modified with at least one inducing peptide of the invention, on osteoblast progenitor cells was compared with the effect of non-modified apatite ceramics, which are conventionally used to manufacture bone implants suitable for humans and animals. The AlamarBlue® assay was used to compare the extent of cell proliferation on the different biomaterials based on detection of metabolic activity. Analysis of these data showed that the proliferation was increased significantly on apatite ceramics covalently modified with GFR-binding compounds as defined herein in comparison with conventional non-modified ceramics (FIG. 2).

### Example 5: Osteogenic Differentiation of Human Mesenchymal Stem Cells

[1172] The biomaterial used was titanium Ti6A4V metal alloy pellets. Human Mesenchymal Stem Cells (hMSCs) were obtained from Lonza®, Inc. Cells were then cultured in low glucose Dulbecco's Modified Eagle Medium (DMEM, Invitrogen®) supplemented with 10% (v/v) fetal bovine serum (FBS), 1% penicillin/streptomycin and incubated in a humidified atmosphere containing 5% (v/v) C02 at 37° C. All the cells were used at a low passage number (≤passage 3), were subconfluently cultured and were seeded at 10 000 cells/cm² for the purpose of the experiments. Stem cell phenotype was analyzed after 62 hours of cell culture on titanium covalently modified with GFR-binding compounds as defined herein (SEQ: ID NO: 15 to 20).

[1173] To probe this lineage specification, immunostaining for Runx2 and Osterix was performed after cell fixation as described in the Methods section. The quantification of Runx2 and Osterix positive contact numbers and areas was performed as described in the Methods section.

[1174] As shown in FIG. 3, when cultured on covalently modified titanium of the invention, the vast majority of the human bone marrow mesenchymal stem cells adheres, spreads, and differentiates into osteoblast-like cells, which was confirmed by increase in the Runx2 and Osterix protein expression (FIG. 3).

### Example 6: Osteogenic Differentiation of Osteoblast Progenitors

[1175] A conventional PEEK carrier was covalently modified with the GFR-binding compounds as defined herein (SEQ ID NO: 21) to produce biomaterials of the invention, and mouse mesenchymal pre-osteoblastic cells (MC3T3-E1, from ATCC®) were cultured thereon. MC3T3-E1 cells were cultured in Alpha-MEM medium supplemented with 10% fetal calf serum (FCS) and 1% penicillin/streptomycin. All the cells were used at a low passage number (passage 4) and were subconfluently cultured. The cells were plated at 10 000 cells/cm² for the purpose of these experiments. The extracellular matrix production was compared between cells cultured on conventional PEEK biomaterials and cells cultured on PEEK biomaterials covalently modified with the GFR-binding compounds as defined herein (SEQ ID NO: 21) after 24 h of cell culture. This was performed by using optical profilometry system probing as described in the Methods section.

[1176] As shown in FIG. 4, the PEEK biomaterials of the invention i.e. conventional PEEK biomaterials covalently modified with at least one type of GFR-binding compounds as defined herein, allow for the differentiation of mouse mesenchymal pre-osteoblastic cells into mature osteoblasts after 24 hours of culture as shown by the synthesis of extracellular matrix such as collagen fibers (FIG. 4b).

[1177] Finally, it was verified that the osteoblast progenitors were transformed into mature osteoblasts when cultured on the covalently modified PEEK biomaterials by analyzing the expression of the osteogenic biomarker Runx2, also called Cbfa-1. An increase in the Runx2 gene expression after 24 hours of culture (FIG. 5) was observed in comparison to non-modified conventional PEEK biomaterials by using Quantitative Real Time Polymerase Chain Reaction as described in the Methods section.

### Example 7: Non-Covalent Depositing of GFR-Binding Compounds as Defined Herein

[1178] Non-covalent modifications of the materials were performed in Air Atmosphere at room temperature. The non-covalent coating strategy consisted in using a mixture of inducing peptide (SEQ ID NO: 23; concentration of 1×10⁻³M) with an apatite ceramics implant or a mixture of inducing peptide (SEQ ID NO: 22; concentration of 1×10⁻³M) with a type-I collagen sponge. The non-covalently coated conventional materials were characterized by using fluorescent peptides (Here SEQ ID NO: 22 and 23 covalently bound to fluorescein isothiocyanate (FITC), FIG. 6). The results shown here in FIG. 6 were obtained from experiments performed with apatite ceramics and a type-I collagen sponge. It can be seen that the interaction between these peptides and the apatite ceramics or the type-I collagen is stable as no significant release of peptides was observed over time. Indeed, after 3, 7 or 10 days, the osteogenic peptides were still coupled to the ceramics or the type-I collagen (FIGS. 7a and b).

[1179] Peptides that were non-covalently deposited through specific peptide fragments (such as WWFWG or GTPGP) added to GFR-binding compounds of the invention are as follows:

SEQ ID NO: 22
WWFWGSAGPSSTPTKMSAISMLYL
SEQ ID NO: 23
GTPGPHVTKPTSVPTKLSAISMLYL
SEQ ID NO: 24
GTPGPVPQELEPLTILYY
SEQ ID NO: 25
GTPGPVPTELSPISVLYK
SEQ ID NO: 26
GTPGPASSVPTKLSAISMLYL
SEQ ID NO: 27
GTPGPVPTGQSAISMLYL
SEQ ID NO: 28
GTPGPVPTEESAISMLYL
SEQ ID NO: 29
GTPGPPTSVPTKLSPISVLYK
SEQ ID NO: 30
GTPGPPSSVPTKLSPISVLYK
SEQ ID NO: 31
GTPGPNDEGLESAPTGQNAISVLYF
SEQ ID NO: 32
WWFWGAAPASSSVPTRLSPISVLYK
SEQ ID NO: 33
WWFWGKASKASSVPTKLSAISMLYL
SEQ ID NO: 34
GTPGPGSAGPSSTPTKMSAISMLYL
SEQ ID NO: 35
GTPGPAAPASSSVPARLSAISMLYL

### Example 8: Proliferation of Progenitor Bone Cells

[1180] The effect of the GFR-binding compounds as defined herein (SEQ ID NO: 24 to 27) of the present invention on the proliferation of osteoblast progenitors was investigated. MC3T3-E1 cells were cultured in Alpha-MEM medium supplemented with 10% fetal calf serum (FCS) and 1% penicillin/streptomycin. All the cells were used at a low passage number (passage 4), were subconfluently cultured and were plated at 10 000 cells/cm² for the purpose of the experiments. The stimulatory effect of the osteogenic peptides, coupled to apatite ceramics or to type-I collagen on osteoblast progenitor cells, was compared to the effect of native apatite ceramics or of native type-I collagen sponge, which are already being used as bone graft/LT-Cage® lumbar tapered fusion devices designed to aid in the treatment of the degenerative disc disease (DDD) in humans. The AlamarBlue® assay was used to compare cell proliferation on the different biomaterials based on detection of metabolic activity. Analysis of these data showed that the cell proliferation proceeded more significantly on apatite ceramics and type-I collagen sponge when coupled to osteogenic peptides as compared to native apatite ceramics and native type-I collagen sponge (FIG. 8).

### Example 9: Osteogenic Differentiation of Human Mesenchymal Stem Cells

[1181] GFR-binding compounds as defined herein were non-covalently deposited on apatite ceramics or type-I collagen onto apatite ceramics or onto type-I collagen sponge. Human Mesenchymal Stem Cells (hMSCs) were obtained from Lonza®, Inc. Cells were then cultured in low glucose Dulbecco's Modified Eagle Medium (DMEM, Invitrogen®) supplemented with 10% (v/v) fetal bovine serum (FBS), 1% penicillin/streptomycin and incubated in a humidified atmosphere containing 5% (v/v) C02 at 37° C. All cell culture experiments were carried out without any serum in the medium for the first 8 hours of culture. All cells were used at a low passage number (≤passage 3), were subconfluently cultured and were seeded at 10 000 cells/cm² for the purpose of the experiments.

[1182] The cell phenotype was analyzed after 96 hours of cell culture on apatite ceramics coupled with osteogenic peptides or on a type-I collagen sponge coupled with osteogenic peptides (SEQ: ID NO: 28 to 31). On GFR-binding compounds as defined herein-coupled apatite ceramics and type-I collagen sponge, the vast majority of the human bone marrow mesenchymal stem cells adhere, spread, and differentiate into osteoblast-like cells as confirmed by analysis of Runx2 and Osterix expression (FIG. 9a). To probe this lineage specification, immunostaining for Runx2 and Osterix was performed after cell fixation as described in the Methods section. The quantification of Runx2 and Osterix positive contact numbers and areas was performed as described in the Methods section.

[1183] Finally, it was verified that the hMSCs were differentiated into mature osteoblasts by analyzing the activity of the osteogenic biomarker ALP (Alkaline Phosphatase Activity). We observed an increase in the ALP activity after 1 week of culture on type-I collagen sponge coupled with GFR-binding compounds as defined herein (SEQ ID NO: 32) (FIG. 9b).

### Example 10: Osteogenic Differentiation of Osteoblast Progenitors

[1184] Mature osteoblasts are the cells responsible for bone formation and are derived from precursor osteoblasts. Mature osteoblasts were obtained and characterized by the expression of osteoblastic markers such as Runx2 and the synthesis of extracellular matrix proteins.

[1185] The effect of these GFR-binding compounds as defined herein (SEQ ID NO: 33) on the differentiation of osteoblast progenitors was evaluated. These osteoblast progenitors were seeded onto the apatite ceramics or on type-I collagen sponge that were both coupled with osteogenic peptides. The cells were differentiated into mature osteoblasts after 48 hours of culture on these non-covalently coated materials. The differentiated osteoblast progenitors produced extensive amounts of extracellular matrix proteins such as Osteopontin (OPN) as compared to the osteoblast precursors cultured on a native type-I collagen sponge. This was seen from Osteopentin immunofluorescence staining after cell fixation as described in the Methods section (FIG. 10).

[1186] Finally, it was verified that the osteoblast progenitors were differentiated into mature osteoblasts by analyzing the expression of the osteogenic biomarker Runx2. An increase in the Runx2 gene expression after 24 hours of culture (FIG. 11) was observed by using Quantitative Real Time Polymerase Chain Reaction as described in the Methods section.

### Example 11: GFR-Binding Compounds as Defined Herein Inducing Cartilage Regeneration

[1187] hMSCs were cultured on native hydrogels ((poly(acrylamide-co-acrylic acid)) having a stiffness of 14 kPa and on hydrogels (also at a stiffness of 14 kPa) covalently modified with GFR-binding compounds as defined herein (SEQ ID NO: 36 and 37). The expression of the Sox9 protein was observed after 96 hours of culture suggesting that hMSCs have committed towards chondrocyte like cell differentiation (FIG. 12a). It was then verified that these hMSCs cultured on the covalently modified hydrogels were differentiated into chondrocyte cells by analyzing the expression of the chondrocyte gene biomarker: Aggrecan. The increased expression of this gene was observed after 96 hours of culture (FIG. 12b). For that a semi-quantitative RT-PCR was performed as described in the Methods section for the Aggrecan gene and a Quantitative Real Time PCR for Sox9.

### Example 12: GFR-Binding Compounds as Defined Herein Inducing Endothelialization

[1188] Human umbilical-vein endothelial cells were cultured on a native polymer (PET) and on a polymer (PET) covalently modified with endothelialization GFR-binding compounds as defined herein (SEQ ID NO: 38). An increase in the area of the adherent junctions (CD31) was observed after 36 hours of culture on the covalently modified PET (FIG. 13). The results observed showed that the GFR-binding compounds as defined herein have the ability to rapidly induce stent endothelialization.

### Example 13: GFR-Binding Compounds as Defined Herein Inducing Angiogenesis

[1189] Human umbilical-vein endothelial cells were cultured on a native polymer (PET) and on a polymer (PET) covalently modified with vascular peptides (SEQ ID NO: 39). The formation of tube-like structures was observed after 18 hours of culture on the covalently modified PET (FIG. 14). The results observed showed that the GFR-binding compounds as defined herein have the ability to rapidly induce angiogenesis.

### Example 14: Wound Healing/Increase of Collective Cell Migration

[1190] Human epithelial cells were cultured on a native polymer (PET) and on a polymer (PET) covalently modified with tissue-closure peptides (SEQ ID NO: 40). A usual scratch test was applied (Nat Protoc 2: 329-333) on a monolayer of these epithelial cells in culture (FIG. 15a). An increase in the cell migration velocity for cells cultured on PET covalently modified with peptides was observed after 18 hours of culture. The cells migrated collectively and the communication between cells was maintained (FIG. 15b). In fact, the injury has been closed rapidly for the cells cultured on polymers covalently modified with GFR-binding compounds as defined herein. The results observed showed that the GFR-binding compounds as defined herein have the ability to rapidly induce tissue closure such as in wound healing.

### Example 15: Loss of Quiescence and Activation of Hair Follicle Stem Cells

[1191] Isolated Hair Follicle Stem Cells were cultured on native hydrogels ((poly(acrylamide-co-acrylic acid)) having a stiffness of 73 kPa and hydrogels (also at a stiffness of 73 kPa) covalently modified with hair follicle stem cells GFR-binding compounds as defined herein (SEQ ID NO: 41 and 42). An increase in the Sox2 protein expression was observed indicative of the activation of these stem cells (FIG. 16a). In parallel, a decrease in the BMP-6 release in the cell culture medium was observed (FIG. 16b). The decrease in the BMP-6 release is indicating that the hair follicle stem cells were activated and that the hair growth process has been induced.

### Example 16: Muscle Differentiation of Human Mesenchymal Stem Cells

[1192] hMSCs were cultured on native hydrogels ((poly(acrylamide-co-acrylic acid)) having a stiffness of 28 kPa and on hydrogels (having the same stiffness of 28 kPa) covalently modified with musculogenic peptides (SEQ ID NO: 43 to 48). We observed an increase in the cell area of the cells cultured on the covalently modified hydrogels after 62 hours of culture suggesting that hMSCs have committed towards muscle differentiation (FIG. 17a).

[1193] It was then verified that these hMSCs cultured on the covalently modified hydrogels were differentiated into muscle cells by analyzing the expression of the musculogenic biomarker COMP (Cartilage Oligomeric Matrix Protein). An increased expression of this gene was observed after 96 hours of culture (FIG. 17b). For that a Quantitative Real Time PCR was performed as described in the Methods section.

### Example 17: Neuron Growth

[1194] Neurons were cultured on native titanium (control) and on titanium covalently modified with neurogenic peptides (SEQ ID NO: 49). A rapid establishment of cell-cell contacts via dendrite growth was observed after 6 hours of culture on the covalently modified titanium (FIG. 18a). This result suggests that the activity of the used neurogenic peptides is to promote the neuron-neuron contacts. To further confirm this the expression of the Growth Associated Protein 43 (GAP43) gene was verified for neuron cells cultured on materials covalently modified with neurogenic peptides (SEQ ID NO: 49). A high level of expression of this gene was observed after 48 hours of culture on the covalently modified titanium by using Quantitative Real Time Polymerase Chain Reaction as described in the Methods section (FIG. 18b).

### Example 18: Loss of Stemness

[1195] hMSCs were cultured on conventional cell culture plastic plates with or without the presence in the cell culture media of different GFR-binding compounds as defined hereins (SEQ ID NO: 50 to 104) in solution. A rapid (48 hours) loss of the sternness marker STRO-1 was observed for the cells cultured in the presence of GFR-binding compounds as defined herein in the cell media solution (FIG. 19). This was probed by Stro-1 immunostaining after cell fixation as described in the Methods section. The quantification of Stro-1 positive contact numbers and areas was performed as described in the Methods section. A minimum of 30 cells per condition were analyzed. All the sequences have an RMSD of 2.45 Å or less as shown in table 4.

TABLE 4

| SEQ ID NO: | Sequences | RMSD (Å) |
|---|---|---|
| SEQ ID NO: 50 | ASAAPSSVPQALRPVQVRKI | 0.79 |
| SEQ ID NO: 51 | ASPSSVSQDLRPVQVRKI | 0.91 |
| SEQ ID NO: 52 | ASASPSSVPQDLRPVQVRKI | 0.88 |
| SEQ ID NO: 53 | NDEGLESVPTEERPVQVRKI | 0.71 |
| SEQ ID NO: 54 | RPVQVRKI | 0.62 |
| SEQ ID NO: 55 | TVPKPSSVPTQLSNITMQIM | 1.1 |
| SEQ ID NO: 56 | AVPKASSVPTKLSNITMQIM | 1.12 |
| SEQ ID NO: 57 | SIPKASSTPTELSPINMLYF | 0.73 |
| SEQ ID NO: 58 | TKPTSTPTKLSPINMLYF | 0.96 |
| SEQ ID NO: 59 | YVPKPSSTPTKLSPINMLYF | 0.77 |
| SEQ ID NO: 60 | ASAAPSSVPQALSSLSILFF | 0.81 |
| SEQ ID NO: 61 | ASASPSSVSQDLSSLSILFF | 0.79 |
| SEQ ID NO: 62 | VVPKPSSAPTQLEPISILYL | 0.72 |
| SEQ ID NO: 63 | AVPKASSAPTKLEPISILYL | 0.79 |
| SEQ ID NO: 64 | KVGKASSVPTKLEPISILYL | 0.79 |
| SEQ ID NO: 65 | SSVKSQPSRVHHKPLSMLYV | 0.71 |
| SEQ ID NO: 66 | RNVQSRPTQVQLKPLSMLYV | 0.79 |
| SEQ ID NO: 67 | KIPKASSVPQELEPLPIVYY | 0.84 |
| SEQ ID NO: 68 | GIPEPSSVPQKMEPLPIVYY | 0.85 |
| SEQ ID NO: 69 | SIPKASSVPQELEPLPIVYY | 0.82 |
| SEQ ID NO: 70 | ASAAPSSVPQALEPLTILYY | 0.87 |
| SEQ ID NO: 71 | ASASPSSVSQDLEPLTILYY | 0.91 |
| SEQ ID NO: 72 | NDEGLESVPTEEEPLTILYY | 0.83 |
| SEQ ID NO: 73 | NDEGLESVPTEESSLSILFF | 0.56 |
| SEQ ID NO: 74 | KASKASSVPTKLSNITMQIM | 1.43 |
| SEQ ID NO: 75 | GSAGPSSTPTKMSNITMQIM | 1.52 |
| SEQ ID NO: 76 | AAPASSSVPARLSNITMQIM | 1.44 |
| SEQ ID NO: 77 | RVPSTSSAPTKTSATSVLYY | 0.87 |
| SEQ ID NO: 78 | ASAAPSSAPTALSATSVLYY | 0.84 |
| SEQ ID NO: 79 | ASASPSSAPTDLSATSVLYY | 0.81 |
| SEQ ID NO: 80 | SIPKASSVPTELRSVKVAKV | 1.23 |
| SEQ ID NO: 81 | HVTKPTSAPTKLRSVKVAKV | 1.21 |
| SEQ ID NO: 82 | TVPKPSSAPTQLRSVKVAKV | 1.11 |
| SEQ ID NO: 83 | KVGKASSVPQKLEPLPIVYY | 1.1 |
| SEQ ID NO: 84 | KASKASSVPQKLEPLPIVYY | 0.77 |
| SEQ ID NO: 85 | RNVQSRPVPTQLSPISVLYK | 1.42 |
| SEQ ID NO: 86 | KIPKASSVPTELSPISVLYK | 1.35 |
| SEQ ID NO: 87 | ASAAPSSVPQALRSVKVAKV | 1.27 |
| SEQ ID NO: 88 | VSQDLRSVKVAKV | 0.96 |
| SEQ ID NO: 89 | ASASPSSVPQDLRSVKVAKV | 1.42 |
| SEQ ID NO: 90 | NDEGLESVPTEERSVKVAKV | 1.45 |
| SEQ ID NO: 91 | TQVKMRPVQVRKI | 0.99 |
| SEQ ID NO: 92 | SIPKASSTQVELRPVQVRKI | 0.97 |
| SEQ ID NO: 93 | KIPKASSTPTELSPINMLYF | 1.13 |
| SEQ ID NO: 94 | GIPEPSSTPTKMSPINMLYF | 1.31 |
| SEQ ID NO: 95 | VPTGQSAISMLYL | 1.23 |
| SEQ ID NO: 96 | NDEGLESVPTEESAISMLYL | 0.96 |
| SEQ ID NO: 97 | NDEGLESVPTEESPISILYI | 0.92 |
| SEQ ID NO: 98 | VVVKSQPSRVHHSPISILYI | 0.79 |
| SEQ ID NO: 99 | SSVKSQPSRVHHSPISILFI | 0.79 |
| SEQ ID NO: 100 | RNVQSRPTQVQLSPISILFI | 0.79 |
| SEQ ID NO: 101 | YVPKPSSAPTKLNAISVLYF | 0.71 |
| SEQ ID NO: 102 | RVPSTSSVPTKTSAISMLYL | 0.67 |
| SEQ ID NO: 103 | HVPKPSSAPTKLEPISILYL | 0.66 |
| SEQ ID NO: 104 | RVPSTSSAPVKTEPISILYL | 0.87 |

### Example 19: Differentiation of Human Hematopoetic Stem Cells

[1196] hMSCs were cultured on conventional cell culture plastic plates with or without the presence in the cell culture media of different GFR-binding peptides as described herein (SEQ ID NO: 1071 to 1085) grafted on a PET surface via the method already described above. A rapid (48 hours) loss of the sternness marker CD-34+ was observed for the cells cultured in the presence of GFR-binding peptides as described herein in the cell media solution. This was probed by CD-34+ immunostaining after cell fixation as described in the Methods section. The quantification of CD-34+ positive contact numbers and areas was performed as described in the Methods section. A minimum of 30 cells per condition were analyzed. CD-34+ positive marrow cells are multipotential and capable of differentiating into all the various blood cell types. All the sequences have a RMSD of 2.45Å or less as defined herein and as shown in table 5.

TABLE 5

| | | | CD34+ |
|---|---|---|---|
| SEQ ID | | RMSD | Expression |
| NO: | Sequences | Å | (%) |
| 1071 | RVPSTSSVPTELSAISVLYL | 1.23 | 29 |
| 1072 | RVPSTSSVPTDLSSLSILFF | 1.01 | 26 |
| 1073 | AASKASSVPQQLSSLSTLFF | 1.02 | 29 |
| 1074 | RVPSTSSVPQQLNAISTLYF | 1.09 | 32 |
| 1075 | AASKASSSRVEESATSTLYY | 0.98 | 28 |
| 1076 | RVPSTSSAPVEESPISTLYI | 0.74 | 27 |
| 1077 | RVPSTSSTQVRLSPISMLFI | 0.82 | 24 |
| 1078 | AASKASSVPTKMEPISTLYL | 0.97 | 30 |
| 1079 | AASKASSAPTKMSPINILYF | 1.01 | 30 |
| 1080 | RVPSTSSTPTKMKPLSILYV | 1.1 | 31 |
| 1081 | KIPKASSVPEELEPLPTVYY | 1.22 | 33 |
| 1082 | KIPKASSTPTGQSNITMQIM | 1.32 | 18 |
| 1083 | KIPKASSTPTRLRSVKMAKV | 1.17 | 17 |
| 1084 | KIPKASSVPTKMRPVQMRKI | 1.18 | 18 |
| 1085 | AASKASSVPAKMRPVQTRKI | 1.23 | 19 |

### Example 20: RMSD Measurement and Biological Activity

[1197] RMSD values are always calculated for a GFR-binding peptide sequence exempt from any bioactive-carrier-affinity-containing group as defined herein (e.g. cysteine, WWFWG, GTPGP, etc. . . . ). When needed i.e. when attachment to a bioactive carrier is contemplated, the bioactive-carrier-affinity-containing group is then present in the GFR-binding compound when it is biologically tested. Using the method detailed in the description, the RMSD of 57 previously reported peptide sequences have been determined (Table 6) and correlated with the expression of STRO-1 after grafted on a PET surface via a procedure as already described above. These data show that a calculated value of RMSD of more than 2.45 Å, in particular more than 2 Å, more particularly more than 1.79 Å, always correlates with no significant hMSCs commitment and/or differentiation of the treated cells. One should note that it is commonly admitted that the expression of STRO-1 in a cell is indicative of a cell that is in a substantially non-differentiated state and the decrease of its expression of at least about 20% is indicative of a cell that has started a processus of differentiation but which may not result in the differentiation of the cell. A decrease of more than 50% would be indicative of the presence of a significant shift towards a differentiated state. A decrease of more than 70% would be indicative of the presence of a very important shift towards a differentiated state. A sustained decrease (e.g. for at least 96 h) of more than 50% or 70% would be indicative of the presence of an even more important shift towards a differentiated state.

TABLE 6

| | | | STRO-1 |
|---|---|---|---|
| SEQ ID | | RMSD | expression |
| NO: | Sequences | (Å) | (%) |
| 1086 | VEQLSNMVVK | 5.2 | 98 |
| 1087 | PIIYYVGRNVRVEQLSNMVVRA | 5.7 | 92 |
| 1088 | PIIYYVGRNVRVEQLSNMVVRRA | 6.1 | 98 |
| 1089 | DPLPIIYYVGRNVRVEQLSNMVVRACKCS | 4.9 | 97 |
| 1090 | ENVNLKKYRNMIVKSCGCH | 7.3 | 97 |
| 1091 | TPTYSRPVQKAELTR | 6.3 | 97 |
| 1092 | HIRSTTSSYVSLKSNITNRTIQTPTYSYT | 8.1 | 98 |
| 1093 | LMDLARMPSCLRGERAVPQDTTGYFTWSSNITPLNFIF | 8.6 | 92 |
| 1094 | NEVLRFCGIQVPEGDEPLT | 6.7 | 98 |
| 1095 | LNEVLRFCGIQVPEGDEPLTY | 6.8 | 99 |
| 1096 | MSRVLFEPLTFLQTGSGLPDEKTLG | 5.9 | 94 |
| 1097 | IKSPARHSAPTHQEPLP | 4.5 | 98 |
| 1098 | NPGASASPCCVSQDLEPLPIL | 5.3 | 86 |
| 1099 | SHQSAGDSIKSPARHSAPTHQEPLPD | 6.4 | 91 |
| 1100 | PNYSVPAGNKPLSERE | 6.8 | 95 |
| 1101 | TKPLSSLLFPNWNTTTTPTPPRP | 7.1 | 91 |
| 1102 | CVTKPLSSLLFPNWNTTTTPTPP | 7 | 92 |
| 1103 | VGAAWWLREQGSPINTLAVPA | 5.9 | 88 |
| 1104 | MQCRELVTQVTEEPISQTEDGEEQESTTTPRLKGQKKE | 4.3 | 85 |
| 1105 | VPTKLEPISVLYKDDMGVPTLKYHYEGMAVSECGCR | 4.2 | 81 |
| 1106 | SPISILVVPELDASLPEKRPSLDGFEALLVYNAPKA | 5.5 | 82 |
| 1107 | TLXPIVSSXNPSPISFRXIKILLHDLEVVPFPKSRVR | 4.8 | 84 |
| 1108 | VPTKLSPISILYLDKGVVTYKFKYEGMSVAECGCR | 4.1 | 80 |
| 1109 | VPTKLSPISILYKDDMGVPTYKFKYEGMSVAECGCR | 4 | 82 |
| 1110 | VPTELSPISLLYLDEFEKVTLKNYQDMVVDG | 3.7 | 87 |
| 1111 | TPTVVSATSL | 3.6 | 98 |
| 1112 | SATSRLALSDVPAELAA | 5.2 | 98 |
| 1113 | LGIAAIIFLQQVPAAFSATSPPG | 5.7 | 97 |
| 1114 | SVPAVCSATSATGPYSSVTVTSWPSIVATGGTT | 4.5 | 92 |
| 1115 | SVPAVCSATSATGPYSTATNTVVVPSIVATGGTT | 5.2 | 92 |
| 1116 | SSVPAVCSATSATGPYSSGSVEVTFDVYATTVY | 5.1 | 92 |
| 1117 | SSVPAVCSATSATGPYSTATNTVVVFDVYATTVY | 4.7 | 91 |
| 1118 | VHLLKPHAVPKACCAPTKLSATSVLYYDSSNNVILRKHRNMVVRACG | 3.8 | 88 |
| | CH | | |
| 1119 | ANINKDRDNVPAATSSLSKAYNP | 6.2 | 92 |
| 1120 | SFRTARANAPTGRSSLSGEKEQQEASTHS | 5.4 | 91 |
| 1121 | DKPEESSSTPTHAQCICSSLSEAIVSSVLSTRLVLSQISLTRAKRAFE | 4.8 | 87 |
| 1122 | KGSEYEKLVVSGITQVYQSSLSWHGCKSCCEVQVXNLXILIRLYDVHY | 4.1 | 88 |
| | YN | | |
| 1123 | MALPQPRGSSLSKAPVVVAPCMALKRVNIRSIVFEVLKTMNQNCIHET | 4.7 | 82 |
| | PN | | |
| 1124 | MAAQDEWRDAITLTMGRDLKKVPQHLNAISVIDPVT | 7 | 83 |
| 1125 | LSLLAPPEPVWNHETSYGSDCHVPTNVNAISKMIDKSNHQTG | 4.3 | 93 |
| 1126 | APTKLNAISVLYFDDSSNVILKKYRNMIVKS | 5.8 | 84 |
| 1127 | APTQLSAISVL | 2.9 | 93 |
| 1128 | FDSRVLKSAISFKENIIF | 2.8 | 89 |
| 1129 | KIPKPSSAPTELSAISMC | 3.3 | 78 |
| 1130 | CPKPSSAPTELSAISMLL | 3.6 | 79 |
| 1131 | TCCVPELSAISMLYLDEN | 4.7 | 84 |
| 1132 | KIPKPSSAPTELSAISMLC | 3.6 | 82 |
| 1133 | KIPKPSSAPTELSAISMLYC | 3.6 | 80 |
| 1134 | CIPKPSSAPTELSAISMLYL | 3.6 | 83 |
| 1135 | CKIPKPSSAPTELSAISMLYL | 3.5 | 78 |
| 1136 | AETLHTLGLSAPVIESAISDAI | 4.6 | 93 |
| 1137 | MRTESTPTTASAISYECLWSPPSNEAAKLHFDS | 6.1 | 94 |
| 1138 | SRVLPIVVQGYVPVQDTKFLGIYYVIGPIIARVILSSSSAISSLNKS | 4.7 | 84 |
| 1139 | CCAPTELSAISVLYFDDSSNVILKKYRNMVVRACGCR | 3.4 | 81 |
| 1140 | CCAPTQLSAISVLYFDDSSNVILKKYRNMVVRACGCR | 3.2 | 82 |
| 1141 | KPCCAPTQLSAISVLYFDDSSNVILKKYRNMVVRACGCR | 3.6 | 80 |
| 1142 | KPCCAPTELSAISVLYFDDSSNVILKKYRNMVVRACGCR | 3.3 | 83 |

[1198] Likewise, using the method detailed in the description, the RMSD of 87 GFR-binding peptide sequence representatives of the invention have been determined (Table 7) and correlated with the expression of STRO-1 after grafted on a PET surface via a procedure as already described above. SEQ ID NO: 1 to 49 were tested in combination with a bioactive carrier as defined above in the Examples Section (i.e. titanium, ceramics, PEEK, hydrogel, etc. . . . ), whereas SEQ ID NO: 1143 to 1180 were tested in solution. These data show that a calculated value of RMSD of 2.45 Å or less, in particular 2 Å or less, more particularly 1.79 Å or less, always correlates with a significant hMSCs commitment and/or differentiation of the treated cells.

TABLE 7

| SEQ | | | STRO-1 |
|---|---|---|---|
| ID | | RMSD | expression |
| NO: | Sequences | (Å) | (%) |
| 1 | GSAGPSSVPTKMSAISMLYL | 0.78 | 21 |
| 2 | AAPASSSVPTRLSAISMLYL | 1.02 | 18 |
| 3 | STPPTSSVPTRLSAISMLYL | 0.98 | 19 |
| 4 | NDEGLESAPTEENAISVLYF | 1.12 | 22 |
| 5 | NDEGLESAPTGQNAISVLYF | 0.77 | 27 |
| 6 | KIPKASSVPTELSATSVLYY | 0.74 | 25 |
| 7 | GIPEPSSVPEKMSATSVLYY | 0.83 | 22 |
| 8 | GSAGPSSVPTKMSPISVLYK | 1.01 | 31 |
| 9 | HVTKPTSVPEKLSSLSILFF | 0.66 | 29 |
| 10 | KVGKASSVSQKLEPLTILYY | 1.31 | 32 |
| 11 | RNVQSRPTQVQLNAISVLYF | 1.08 | 24 |
| 12 | HVPKPSSAPTKLSAISMLYL | 0.88 | 28 |
| 13 | KVGKASSVPTKLEPLTILYY | 0.72 | 26 |
| 14 | RNVQSRPTQVQLSAISMLYL | 0.68 | 16 |
| 15 | ASASPSSVSQDLSAISMLYL | 0.7 | 13 |
| 16 | HVPKPSSVPTKLSPISVLYK | 1.11 | 23 |
| 17 | NDEGLESVPTGQNAISVLYF | 1.05 | 31 |
| 18 | TVPKPSSAPTQLSAISMLYL | 0.93 | 23 |
| 19 | AVPKASSAPTKLSAISMLYL | 0.59 | 19 |
| 20 | KVGKASSVPTKLSAISMLYL | 0.64 | 19 |
| 21 | GGGKASSVPTKLSAISMLYL | 1.56 | 30 |
| 22 | WWFWGSAGPSSTPTKMSAISMLYL | 1.14 | 29 |
| 23 | GTPGPHVTKPTSVPTKLSAISMLYL | 1.02 | 28 |
| 24 | GTPGPVPQELEPLTILYY | 0.88 | 16 |
| 25 | GTPGPVPTELSPISVLYK | 0.87 | 17 |
| 26 | GTPGPASSVPTKLSAISMLYL | 0.62 | 23 |
| 27 | GTPGPVPTGQSAISMLYL | 0.7 | 24 |
| 28 | GTPGPVPTEESAISMLYL | 0.65 | 22 |
| 29 | GTPGPPTSVPTKLSPISVLYK | 0.59 | 27 |
| 30 | GTPGPPSSVPTKLSPISVLYK | 0.68 | 26 |
| 31 | GTPGPNDEGLESAPTGQNAISVLYF | 1.56 | 32 |
| 32 | WWFWGAAPASSSVPTRLSPISVLYK | 1.67 | 27 |
| 33 | WWFWGKASKASSVPTKLSAISMLYL | 0.96 | 26 |
| 34 | GTPGPGSAGPSSTPTKMSAISMLYL | 1.03 | 26 |
| 35 | GTPGPAAPASSSVPARLSAISMLYL | 1.6 | 19 |
| 36 | AVPKASSAPTKLEPLPIVYY | 0.53 | 21 |
| 37 | KIPKASSVSQELEPLTILYY | 0.87 | 17 |
| 38 | STPPTSSSRVRLRSVKVAKV | 1.81 | 34 |
| 39 | KVGKASSVPTKLSNITMQIM | 0.9 | 32 |
| 40 | ASASPSSTQVDLRPVQVRKI | 1.34 | 36 |
| 41 | AASKASSVPEKLSSLSILFF | 0.66 | 28 |
| 42 | GSAGPSSVPEKMSSLSILFF | 0.81 | 26 |
| 43 | RVPSTSSVPAKTSPISILYI | 1.01 | 15 |
| 44 | ASAAPSSVPAALSPISILYI | 1.22 | 15 |
| 45 | NDEGLESVPAEESPISILYI | 1.21 | 16 |
| 46 | VPAGQSPISILYI | 0.75 | 20 |
| 47 | NDEGLESVPAEESPISILYI | 0.86 | 18 |
| 48 | VPAEESPISILYI | 0.64 | 21 |
| 49 | GIPEPSSVPAKMSPISILYI | 1.06 | 19 |
| 1143 | NDEGLESVPEDLSSLSVLFF | 1.92 | 23 |
| 1144 | RVPSTSSVPTGQSAISTLYL | 1.78 | 19 |
| 1145 | RVPSTSSAPTKMNAISMLYF | 1.5 | 23 |
| 1146 | GIPEPSSAPTELSATSILYY | 1.66 | 20 |
| 1147 | STPPTSSVPTELSPISTLYK | 1.71 | 21 |
| 1148 | GIPEPSSAPVDLKPLSTLYV | 1.53 | 11 |
| 1149 | AASKASSVPQEEEPLPMVYY | 1.54 | 23 |
| 1150 | KIPKASSVSQKMEPLTMLYY | 1.7 | 20 |
| 1151 | KIPKASSVPTGGSNITVQIM | 1.43 | 32 |
| 1152 | AASKASSSRVELRSVKIAKV | 1.23 | 33 |
| 1153 | KIPKASSTQVRLRPVQIRKI | 1.87 | 30 |
| 1154 | STPPTSSSRVQLSAISMLYL | 1.44 | 15 |
| 1155 | RVPSTSSTQVKMSAISMLYL | 0.97 | 17 |
| 1156 | GIPEPSSVSQEESSLSTLFF | 0.88 | 19 |
| 1157 | KIPKASSSRVRLSSLSTLFF | 1.32 | 20 |
| 1158 | AASKASSTPTDLNAISTLYF | 1.66 | 20 |
| 1159 | RVPSTSSTQVDLNAISVLYF | 1.84 | 23 |
| 1160 | GIPEPSSVSQELSATSMLYY | 1.49 | 22 |
| 1161 | KIPKASSTQVGQSATSILYY | 1.93 | 27 |
| 1162 | STPPTSSAPVGQSPISMLYI | 1.83 | 19 |
| 1163 | KIPKASSTPTRLSPISMLFI | 1.45 | 28 |
| 1164 | GIPEPSSAPTRLEPISMLYL | 1.56 | 16 |
| 1165 | KIPKASSVSQQLEPISTLYL | 1.57 | 17 |
| 1166 | STPPTSSVPTEVSPINTLYF | 1.78 | 19 |
| 1167 | AASKASSSRVKMSPINVLYF | 1.75 | 19 |
| 1168 | KIPKASSVPTKMKPLSVLYV | 1.68 | 21 |
| 1169 | RVPSTSSAPTKMKPLSMLYV | 1.48 | 22 |
| 1170 | STPPTSSVSQKMKPLSILYV | 1.46 | 25 |
| 1171 | KIPKASSVPAQLEPLPIVYY | 1.71 | 28 |
| 1172 | GIPEPSSAPVGQEPLPMVYY | 1.74 | 28 |
| 1173 | RVPSTSSVPEKMEPLTMLYY | 1.8 | 18 |
| 1174 | GIPEPSSAPVEEEPLTTLYY | 1.75 | 21 |
| 1175 | STPPTSSTPTKMSNITTQIM | 1.97 | 27 |
| 1176 | RVPSTSSVPAEESNITVQIM | 1.92 | 26 |
| 1177 | AASKASSVPQRLRSVKVAKV | 2.01 | 31 |
| 1178 | KIPKASSTQVRLRSVKTAKV | 2.04 | 35 |
| 1179 | AASKASSVPEKMRPVQTRKI | 2.14 | 32 |
| 1180 | GIPEPSSAPVDMRPVQIRKI | 2.17 | 30 |

### Example 21: Application in the Treatment of Osteoporosis

[1199] The following study alms at validating the osteoinduction, osteoconducion and osteoclast Inhibition activity properties of the GFR-binding compounds In a critical size fracture Induced defect in an osteoporosis rat model. The goal Is to induce the process of bone regeneration In a physiological way resulting in osteogenesis without bone formation anomalies like ectopic growth or osteopetrosis.

[1200] A. Osteoporosis Rat Model

[1201] Given that the acceleration of bone turnover caused by oestrogen deficiency at menopause is the most common cause of osteoporosis, animal models that lose bone in response to oestrogen deficiency are preferred in the preclinical examination of therapeutic agents. This bone loss is characterized by an increased turnover rate, decreased bone mass as measured by densitometry and decreased bone volume. The ovariectomy-induced osteoporosis (OVX) rat model is most commonly used in research on osteoporosis and in preclinical animal studies. After ovariectomy, bone resorption exceeds bone formation, causing a rapid and reproducible bone loss in response to oestrogen deficiency.

[1202] B. Experimental Protocol

[1203] An overview of the experimental protocol is schematically represented in FIG. 21.

[1204] B.1. Surgical Procedure

[1205] After 1 week of adaptation period, 3-month-old female rats (Sprague Dawley® strain) were subjected to bilateral ovariectomy (OVX) dorsal surgery. This procedure involves pain and therefore an analgesic administration was performed 30 minutes before surgery and 6 hours after surgery. Significant bone loss in the femoral condyle due to induced estrogen deficiency is typically obtained 8 weeks after the surgery with this animal model. One week before compound administration the OVX rats were randomly assigned to three different groups.

[1206] B.2. Compound Administration

[1207] Eight weeks after the surgery, a critical size defect of 3 mm was drilled in the femoral condyle of the OVX rats at J0 and a covalently bound GFR-binding compound (SEQ ID NO: 1181) was site administrated. This critical size defect would not heal alone through complete bone formation without external intervention at the experimental endpoints of the present study: 3 weeks and 12 weeks. The control conditions include a “No implantation” condition for which no implantations were performed in the defect as well as one ceramic (70% TCP30% HA) implant: a granulated ceramic powder (Control 2). SEQ ID NO: 1181 was grafted (via covalent binding of a N-terminal cysteine using a procedure already described herein) on a granulated ceramic powder (enabling osteoconduction). Hereinafter the various experimental conditions, the results for which are detailed below:

| | | | Reference |
|---|---|---|---|
| | | Type of | or test |
| Experimental conditions | Code | product | product |
| No implantation (empty defect) | No | None | Reference |
| | implantation | | |
| Granulated Ceramic Powder | Control 2 | Powder | Reference |
| Granulated Ceramic powder | HTD-PCL-M01 | Powder | Test |
| grafted with SEQ ID NO: 1181 | | | |

[1208] Two experimental endpoints were tested in the present study: 3 weeks and 12 weeks after compound administration. The first endpoint of 3 weeks allows the detection of an early osteogenesis process involving stem cells and progenitor cells differentiation towards the osteoblast lineage. The second endpoint of 12 weeks allows the detection of osteoporosis defect healing and the assessment of stably and efficiently induced osteogenesis. The experimenters were blinded to group assignment until the completion of the procedure, and again at the time of the results assessment analysis performed with various techniques.

[1209] B.3. Histopathological Analysis

[1210] For all the experimental conditions, the femoral defect sites were removed and resin embedded without prior demineralization, after which successive coronal sections were produced. A thorough histopathological analysis has been then performed on these sections in order to assess tissue and cellular structure and therefore the osteogenesis, osteoinduction, osteoconduction and bone resorption processes with the following stainings:
[1211] Hematoxylin-Eosin (HE) staining to qualitatively analyze tissue morphology as well as: presence or not of the administrated compounds, bone remodeling (bone formation and bone resorption) at the defect sites, the presence of osteoblast cells. A semi-quantitative analysis of osteoblast cell detection was performed, as the presence of osteoblasts in the defect site area is an indicator of osteoinduction and new bone formation.
[1212] Tartrate-resistant acid phosphatase (TRAP) staining: to highlight active osteoclasts (in red) that produce the TRAP-isoenzyme but also the osteoclast fraction at the defect sites and its surroundings. Osteoclast activity is an indicator of bone resorption.
[1213] Von Kossa Van Gieson (VKVG) staining: to highlight mineralized tissue (in black) including newly formed bone tissue, native bone, and the calcified compounds as well as the non mineralized osteoid tissue (dark pink). The fibrous tissue is stained in light pink and the bone marrow in light orange. The VKVG staining allows assessing the percentage of mineralized and osteoid tissue in and around the defect site as well as the amount of remaining compounds at the defect site area 3 and 12 weeks after administration.

[1214] In addition, the tolerance rate of the various administrated compounds can be evaluated by examining tissue integrity at the defect site, presence and amount of necrotic tissue and presence of inflammatory cell infiltration such as immune cells and macrophages.

[1215] C. Results

[1216] Regarding the “No implantation” condition, 3 weeks after inducing a critical size defect, a thickening of the periosteum (fibrous tissue) can be observed at the defect entry for all the stainings (FIG. 22, left). This indicates that a closing of the defect site entry has been initiated and completed after 12 weeks (FIG. 22, right). In addition, no inflammatory cells could be detected in the periosteum suggesting a complete lack of surgery related inflammatory process at 3 weeks. Osteoclast activity is present at the defect entry at 3 weeks but no active osteoclasts could be detected after 12 weeks (FIG. 22, TRAP staining). Finally, mineralized bone tissue is observed at the defect site entry at 3 weeks with very little osteoid tissue (FIG. 22, VKVG staining) and the defect entry is closed after 12 weeks with mineralized tissue. However, no osteoid tissue could be detected in contact with the mineralized tissue at the defect entry at 12 weeks suggesting the absence of any bone formation activity. In addition, no bone tissue structures or bone trabeculae could be detected inside the defect, indicating that osteogenic activity did not occur in that area during 12 weeks. Thus, 12 weeks after inducing a critical size defect in the “No implantation” condition, the entry of the defect site was closed with mineralized bone tissue and periosteum thickening. No osteoid tissue could be detected at the entry site and no bone tissue structures or osteoid could be observed inside the defect area indicating a complete lack of bone formation and osteogenic activity.

[1217] Three weeks after HTD-PCL-M01 administration at the defect site, a periosteum closing of the defect entry has been initiated and completed at 12 weeks as observed on all the stainings (FIG. 23A, right and FIG. 23B, right). The periosteum infiltration at the defect entry is associated with an increased resorption of the granulated ceramics of the HTD-PCL-M01 condition as compared to Control 2 for all of the stainings (FIG. 23A and B). Strikingly, the defect site edges are clearly visible in the HTD-PCL-M01 condition as compared to Control 2 where the edges cannot be distinguished (FIG. 23A, VKVG staining). This is due to the important osteoid formation induced 3 weeks after HTD-PCL-M01 site administration. This important osteogenic activity induced by the HTD-PCL-M01 compound is further confirmed by the observed increase in bone trabeculae and defect filling at 3 weeks and a further increase in bone trabeculae combined with a cortical bone thickening at 12 weeks (FIG. 23A and B, HE staining). This osteogenic activity is associated with the presence of osteoblast cells around the HTD-PCL-M01 compound, which is not the case for the Control 2 condition (FIG. 23A and B, HE staining). Moreover, less active osteoclast cells could be detected in the HTD-PCL-M01 condition as compared to Control 2, suggesting a decreased osteoclast activity 3 and 12 weeks after HTD-PCL-M01 administration (FIG. 23A and B, TRAP staining). Strikingly, an important increase in mineralized and osteoid tissue is observed inside the defect and at the defect entry 12 weeks after HTD-PCL-M01 compound administration as compared to Control 2 (FIG. 23B, VKVG staining). This indicates a further increase in osteogenic activity between 3 and 12 weeks for the HTD-PCL-M01 condition. In conclusion, HTD-PCL-M01 is very efficiently inducing bone formation at a critical defect site as revealed by an increased osteoid and mineralized bone tissue formation 3 and 12 weeks after administration. This increased osteogenic activity is associated with the presence of osteoblast cells, a decreased osteoclast (bone resorption) activity and an increase in ceramics resorption. This indicates that HTD-PCL-M01 triggers osteoinduction in addition to osteoconduction. The HTD-PCL-M01 compound is therefore very well suited for efficient bone reconstruction of osteoporosis related fractures as compared to the granulated ceramic powder of Control 2, which is a product already present on the market for bone reconstruction.

[1218] D. Conclusions

[1219] The present CRO-conducted blind randomized preclinical pilot trial has validated the efficiency of a covalently bound representative GFR-binding compound as disclosed herein, for the treatment and prevention of osteoporosis and osteoporosis related fractures in an osteoporosis animal model. Osteoinductive activity was observed through bone tissue regeneration of critical size induced defects. The representative GFR-binding compounds were well tolerated and have efficiently induced bone formation as revealed by an increased osteoid and mineralized bone tissue formation at the defect area, 3 and 12 weeks after administration.

[1220] It was shown that HTD-PCL-M01 increased bone formation activity, increased the amount of osteoblast cells, decreased osteoclast (bone resorption) activity and increased ceramics resorption. This indicates that HTD-PCL-M01 triggers osteoinduction in addition to osteoconduction. HTD-PCL-M01 is therefore very well suited for efficient site administration as combined medical device for bone reconstruction of osteoporosis related fractures.

[1221] At 3 weeks, the compound has induced the early osteogenesis process involving stem cells and progenitor cells differentiation towards the osteoblast lineage. At 12 weeks the compound was proven efficient in inducing stable osteogenesis and inducing efficient osteoporosis defect healing. These results obtained after 12 weeks are of utmost importance for patients having osteoporotic related fractures, who usually remain significantly impaired for much longer periods of time or permanently.

[1222] Thus, GFR-binding compounds of the present disclosure represent new therapeutic solutions for osteoporosis with the unique ability to decouple bone resorption from bone formation by increasing bone formation and concomitantly decreasing bone resorption, which is required to achieve efficient bone strengthening in osteoporosis patients as compared to the existing treatments.

[1223] Advantageously, the animals used in the experiments did not present any deleterious side effects regardless of the experimental condition. In addition, the animal body weight was monitored twice a week during the course of the experiment, and a very slight weight loss was observed just after the ovariectomy surgery due to the anesthesia related decrease in food intake for all the animals, which is classically observed for this animal model. No compound administration related weight loss could be detected. Combined with the complete absence of deleterious side effects, this indicates that the administrated compound did not negatively interfere with the normal animal metabolism and physiology. Moreover, no animals were euthanized during the course of the experiment due to advanced state of morbidity or signs of pain. The animals were euthanized at the experimental endpoints 3 or 12 weeks after compound administration and a macroscopic post-mortem analysis was performed on the entire animal and specifically at the administration sites. The analysis has revealed no visible signs of inflammation or necrosis at the administration sites for all the animals. This indicates that the compound was well tolerated by the animals, which was also confirmed microscopically by the very small amount of immune cells at the administration sites. Finally, no animals with indications of the osteopetrosis disorder were detected.

1-100. (canceled)

101. A peptide that is up to 30 amino acids in length and that comprises a peptide with four amino acids, PEP1;
wherein PEP1 is selected from the group consisting of SAIS, NAIS and SPIS,
wherein the RMSD value of the structure coordinates of said peptide or peptidomimetic with respect to PEPREF is 2.45 Å (Angstroms) or less;
and wherein PEPREF is

| | | | | | | | | |
|---|---|---|---|---|---|---|---|---|
| ATOM | 511 | N | LYS | A | 1 | −14.570 | 46.437 | 27.424 |
| ATOM | 512 | CA | LYS | A | 1 | −13.512 | 45.748 | 28.151 |
| ATOM | 513 | C | LYS | A | 1 | −13.655 | 44.259 | 27.884 |
| ATOM | 514 | O | LYS | A | 1 | −12.769 | 43.463 | 28.197 |
| ATOM | 515 | CB | LYS | A | 1 | −13.605 | 46.029 | 29.652 |
| ATOM | 516 | CG | LYS | A | 1 | −13.640 | 47.509 | 29.991 |
| ATOM | 517 | CD | LYS | A | 1 | −12.615 | 48.297 | 29.183 |
| ATOM | 518 | CE | LYS | A | 1 | −12.625 | 49.768 | 29.575 |
| ATOM | 519 | NZ | LYS | A | 1 | −13.994 | 50.369 | 29.497 |
| ATOM | 520 | N | ILE | A | 2 | −14.792 | 43.890 | 27.309 |
| ATOM | 521 | CA | ILE | A | 2 | −15.051 | 42.499 | 26.967 |
| ATOM | 522 | C | ILE | A | 2 | −14.911 | 42.370 | 25.444 |
| ATOM | 523 | O | ILE | A | 2 | −15.531 | 43.125 | 24.683 |
| ATOM | 524 | CB | ILE | A | 2 | −16.466 | 42.065 | 27.401 |
| ATOM | 525 | CG1 | ILE | A | 2 | −16.630 | 42.238 | 28.915 |
| ATOM | 526 | CG2 | ILE | A | 2 | −16.710 | 40.629 | 26.985 |
| ATOM | 527 | CD1 | ILE | A | 2 | −15.631 | 41.478 | 29.30 |
| ATOM | 528 | N | PRO | A | 3 | −14.085 | 41.411 | 24.989 |
| ATOM | 529 | CA | PRO | A | 3 | −13.789 | 41.109 | 23.588 |
| ATOM | 530 | C | PRO | A | 3 | −14.998 | 40.695 | 22.768 |
| ATOM | 531 | O | PRO | A | 3 | −15.969 | 40.164 | 23.305 |
| ATOM | 532 | CB | PRO | A | 3 | −12.785 | 39.968 | 23.688 |
| ATOM | 533 | CG | PRO | A | 3 | −12.156 | 40.166 | 25.007 |
| ATOM | 534 | CD | PRO | A | 3 | −13.330 | 40.506 | 25.867 |
| ATOM | 535 | N | LYS | A | 4 | −14.937 | 40.937 | 21.463 |
| ATOM | 536 | CA | LYS | A | 4 | −16.023 | 40.529 | 20.590 |
| ATOM | 537 | C | LYS | A | 4 | −15.886 | 39.015 | 20.391 |
| ATOM | 538 | O | LYS | A | 4 | −14.903 | 38.415 | 20.831 |
| ATOM | 539 | CB | LYS | A | 4 | −15.926 | 41.244 | 19.245 |
| ATOM | 540 | CG | LYS | A | 4 | −15.802 | 42.751 | 19.355 |
| ATOM | 541 | CD | LYS | A | 4 | −16.292 | 43.433 | 18.083 |
| ATOM | 542 | CE | LYS | A | 4 | −16.162 | 44.943 | 18.177 |
| ATOM | 543 | NZ | LYS | A | 4 | −16.825 | 45.628 | 17.019 |
| ATOM | 544 | N | ALA | A | 5 | −16.85 | 38.393 | 19.759 |
| ATOM | 545 | CA | ALA | A | 5 | −16.811 | 36.955 | 19.507 |
| ATOM | 546 | C | ALA | A | 5 | −15.772 | 36.771 | 18.416 |
| ATOM | 547 | O | ALA | A | 5 | −15.727 | 37.534 | 17.455 |
| ATOM | 548 | CB | ALA | A | 5 | −18.168 | 36.419 | 19.043 |
| ATOM | 549 | N | CYS | A | 6 | −14.935 | 35.756 | 18.562 |
| ATOM | 550 | CA | CYS | A | 6 | −13.887 | 35.518 | 17.584 |
| ATOM | 551 | C | CYS | A | 6 | −14.347 | 34.765 | 16.338 |
| ATOM | 552 | O | CYS | A | 6 | −15.327 | 34.018 | 16.368 |
| ATOM | 553 | CB | CYS | A | 6 | −12.743 | 34.768 | 18.241 |
| ATOM | 554 | SG | CYS | A | 6 | −11.198 | 34.959 | 17.353 |
| ATOM | 555 | N | CYS | A | 7 | −13.623 | 34.973 | 15.243 |
| ATOM | 556 | CA | CYS | A | 7 | −13.931 | 34.328 | 13.969 |
| ATOM | 557 | C | CYS | A | 7 | −13.091 | 33.071 | 13.798 |
| ATOM | 558 | O | CYS | A | 7 | −11.961 | 33.123 | 13.302 |
| ATOM | 559 | CB | CYS | A | 7 | −13.653 | 35.290 | 12.824 |
| ATOM | 560 | SG | CYS | A | 7 | −13.930 | 34.633 | 11.154 |
| ATOM | 561 | N | VAL | A | 8 | −13.654 | 31.941 | 14.209 |
| ATOM | 562 | CA | VAL | A | 8 | −12.949 | 30.684 | 14.110 |
| ATOM | 563 | C | VAL | A | 8 | −13.653 | 29.733 | 13.157 |
| ATOM | 564 | O | VAL | A | 8 | −14.759 | 30.016 | 12.687 |
| ATOM | 565 | CB | VAL | A | 8 | −12.814 | 30.038 | 15.492 |
| ATOM | 566 | CG1 | VAL | A | 8 | −11.807 | 30.825 | 16.337 |
| ATOM | 567 | CG2 | VAL | A | 8 | −14.161 | 30.006 | 16.170 |
| ATOM | 568 | N | PRO | A | 9 | −13.003 | 28.601 | 12.828 |
| ATOM | 569 | CA | PRO | A | 9 | −13.593 | 27.615 | 11.918 |
| ATOM | 570 | C | PRO | A | 9 | −14.726 | 26.886 | 12.631 |
| ATOM | 571 | O | PRO | A | 9 | −14.581 | 26.476 | 13.780 |
| ATOM | 572 | CB | PRO | A | 9 | −12.423 | 26.676 | 11.601 |
| ATOM | 573 | CG | PRO | A | 9 | −11.204 | 27.487 | 11.925 |
| ATOM | 574 | CD | PRO | A | 9 | −11.620 | 28.226 | 13.163 |
| ATOM | 575 | N | THR | A | 10 | −15.847 | 26.721 | 11.942 |
| ATOM | 576 | CA | THR | A | 10 | −16.999 | 26.060 | 12.527 |
| ATOM | 577 | C | THR | A | 10 | −17.334 | 24.767 | 11.804 |
| ATOM | 578 | O | THR | A | 10 | −18.097 | 23.943 | 12.303 |
| ATOM | 579 | CB | THR | A | 10 | −18.211 | 27.010 | 12.523 |
| ATOM | 580 | OG1 | THR | A | 10 | −18.491 | 27.445 | 11.185 |
| ATOM | 581 | CG2 | THR | A | 10 | −17.902 | 28.230 | 13.375 |
| ATOM | 582 | N | GLU | A | 11 | −16.750 | 24.586 | 10.627 |
| ATOM | 583 | CA | GLU | A | 11 | −16.980 | 23.377 | 9.848 |
| ATOM | 584 | C | GLU | A | 11 | −15.643 | 22.935 | 9.246 |
| ATOM | 585 | O | GLU | A | 11 | −15.029 | 23.666 | 8.464 |
| ATOM | 586 | CB | GLU | A | 11 | −17.981 | 23.624 | 8.715 |
| ATOM | 587 | CG | GLU | A | 11 | −19.421 | 23.807 | 9.163 |
| ATOM | 588 | CD | GLU | A | 11 | −19.686 | 25.166 | 9.770 |
| ATOM | 589 | OE1 | GLU | A | 11 | −19.478 | 26.175 | 9.073 |
| ATOM | 590 | OE2 | GLU | A | 11 | −20.111 | 25.227 | 10.939 |
| ATOM | 591 | N | LEU | A | 12 | −15.183 | 21.749 | 9.622 |
| ATOM | 592 | CA | LEU | A | 12 | −13.923 | 21.254 | 9.104 |
| ATOM | 593 | C | LEU | A | 12 | −14.062 | 19.912 | 8.386 |
| ATOM | 594 | O | LEU | A | 12 | −15.136 | 19.299 | 8.359 |
| ATOM | 595 | CB | LEU | A | 12 | −12.893 | 21.144 | 10.230 |
| ATOM | 596 | CG | LEU | A | 12 | −12.660 | 22.422 | 11.054 |
| ATOM | 597 | CD1 | LEU | A | 12 | −13.475 | 22.350 | 12.337 |
| ATOM | 598 | CD2 | LEU | A | 12 | −11.181 | 22.586 | 11.399 |
| ATOM | 599 | N | SER | A | 13 | −12.971 | 19.476 | 7.771 |
| ATOM | 600 | CA | SER | A | 13 | −12.964 | 18.218 | 7.046 |
| ATOM | 601 | C | SER | A | 13 | −11.568 | 17.628 | 7.164 |
| ATOM | 602 | O | SER | A | 13 | −10.613 | 18.320 | 7.550 |
| ATOM | 603 | CB | SER | A | 13 | −13.346 | 18.435 | 5.578 |
| ATOM | 604 | OG | SER | A | 13 | −12.404 | 19.261 | 4.923 |
| ATOM | 605 | N | ALA | A | 13 | −11.449 | 16.352 | 6.818 |
| ATOM | 606 | CA | ALA | A | 13 | −10.179 | 15.665 | 6.949 |
| ATOM | 607 | C | ALA | A | 13 | −9.421 | 15.471 | 5.652 |
| ATOM | 608 | O | ALA | A | 13 | −9.941 | 15.720 | 4.563 |
| ATOM | 609 | CB | ALA | A | 13 | −10.413 | 14.306 | 7.626 |
| ATOM | 610 | N | ILE | A | 14 | −8.171 | 15.046 | 5.783 |
| ATOM | 611 | CA | ILE | A | 14 | −7.343 | 14.746 | 4.623 |
| ATOM | 612 | C | ILE | A | 14 | −6.475 | 13.559 | 5.004 |
| ATOM | 613 | O | ILE | A | 14 | −6.212 | 13.316 | 6.183 |
| ATOM | 614 | CB | ILE | A | 14 | −6.401 | 15.916 | 4.183 |
| ATOM | 615 | CG1 | ILE | A | 14 | −5.284 | 16.106 | 5.200 |
| ATOM | 616 | CG2 | ILE | A | 14 | −7.188 | 17.211 | 3.982 |
| ATOM | 617 | CD1 | ILE | A | 14 | −4.173 | 16.973 | 4.696 |
| ATOM | 618 | N | SER | A | 15 | −6.045 | 12.806 | 3.999 |
| ATOM | 619 | CA | SER | A | 15 | −5.187 | 11.662 | 4.242 |
| ATOM | 620 | C | SER | A | 15 | −3.740 | 12.089 | 4.217 |
| ATOM | 621 | O | SER | A | 15 | −3.360 | 13.020 | 3.508 |
| ATOM | 622 | CB | SER | A | 15 | −5.416 | 10.584 | 3.185 |
| ATOM | 623 | OG | SER | A | 15 | −6.667 | 9.971 | 3.401 |
| ATOM | 624 | N | MET | A | 16 | −2.933 | 11.409 | 5.012 |
| ATOM | 625 | CA | MET | A | 16 | −1.518 | 11.700 | 5.047 |
| ATOM | 626 | C | MET | A | 16 | −0.778 | 10.414 | 5.244 |
| ATOM | 627 | O | MET | A | 16 | −1.137 | 9.594 | 6.078 |
| ATOM | 628 | CB | MET | A | 16 | −1.170 | 12.694 | 6.164 |
| ATOM | 629 | CG | MET | A | 16 | −1.848 | 14.042 | 5.974 |
| ATOM | 630 | SD | MET | A | 16 | −1.017 | 15.431 | 6.760 |
| ATOM | 631 | CE | MET | A | 16 | −0.799 | 14.823 | 8.475 |
| ATOM | 632 | N | LEU | A | 17 | 0.238 | 10.231 | 4.426 |
| ATOM | 633 | CA | LEU | A | 17 | 1.077 | 9.065 | 4.508 |
| ATOM | 634 | C | LEU | A | 17 | 2.289 | 9.610 | 5.264 |
| ATOM | 635 | O | LEU | A | 17 | 2.939 | 10.565 | 4.818 |
| ATOM | 636 | CB | LEU | A | 17 | 1.461 | 8.608 | 3.100 |
| ATOM | 637 | CG | LEU | A | 17 | 2.324 | 7.355 | 2.955 |
| ATOM | 638 | CD1 | LEU | A | 17 | 1.553 | 6.145 | 3.445 |
| ATOM | 639 | CD2 | LEU | A | 17 | 2.723 | 7.190 | 1.492 |
| ATOM | 640 | N | TYR | A | 18 | 2.581 | 9.029 | 6.418 |
| ATOM | 641 | CA | TYR | A | 18 | 3.706 | 9.501 | 7.196 |
| ATOM | 642 | C | TYR | A | 18 | 4.434 | 8.333 | 7.835 |
| ATOM | 643 | O | TYR | A | 18 | 4.081 | 7.186 | 7.603 |
| ATOM | 644 | CB | TYR | A | 18 | 3.222 | 10.458 | 8.281 |
| ATOM | 645 | CG | TYR | A | 18 | 2.386 | 9.782 | 9.346 |
| ATOM | 646 | CD1 | TYR | A | 18 | 1.029 | 9.527 | 9.147 |
| ATOM | 647 | CD2 | TYR | A | 18 | 2.961 | 9.379 | 10.550 |
| ATOM | 648 | CE1 | TYR | A | 18 | 0.273 | 8.894 | 10.128 |
| ATOM | 649 | CE2 | TYR | A | 18 | 2.218 | 8.745 | 11.526 |
| ATOM | 650 | CZ | TYR | A | 18 | 0.877 | 8.508 | 11.317 |
| ATOM | 651 | OH | TYR | A | 18 | 0.134 | 7.922 | 12.318 |
| ATOM | 652 | N | LEU | A | 19 | 5.439 | 8.651 | 8.650 |
| ATOM | 653 | CA | LEU | A | 19 | 6.255 | 7.661 | 9.347 |
| ATOM | 654 | C | LEU | A | 19 | 6.210 | 7.946 | 10.847 |
| ATOM | 655 | O | LEU | A | 19 | 6.685 | 8.992 | 11.288 |
| ATOM | 656 | CB | LEU | A | 19 | 7.701 | 7.763 | 8.871 |
| ATOM | 657 | CG | LEU | A | 19 | 7.901 | 7.850 | 7.359 |
| ATOM | 658 | CD1 | LEU | A | 19 | 9.300 | 8.379 | 7.039 |
| ATOM | 659 | CD2 | LEU | A | 19 | 7.669 | 6.482 | 6.748 |

102. The peptide of claim 101, that comprises a peptide PEP9, wherein the pair PEP9:PEP1 is selected from the group consisting of GIPEPXXVPTKM (SEQ ID NO: 6493):SAIS (SEQ ID NO: 6360), HVTKPTXVPTKL (SEQ ID NO: 6519):SAIS (SEQ ID NO: 6360), YVPKPXXVPTKL (SEQ ID NO: 6589):SAIS (SEQ ID NO: 6360), TVPKPXXVPTQL (SEQ ID NO: 6581):SAIS (SEQ ID NO: 6360), AVPKAXXVPTKL (SEQ ID NO: 6485):SAIS (SEQ ID NO: 6360), KVGKAXXVPTKL (SEQ ID NO: 6543):SAIS (SEQ ID NO: 6360), KASKAXXVPTKL (SEQ ID NO: 6527):SAIS (SEQ ID NO: 6360), GSAGPXXVPTKM (SEQ ID NO: 6501):SAIS (SEQ ID NO: 6360), AAPASXXVPTRL (SEQ ID NO: 6461):SAIS (SEQ ID NO: 6360), STPPTXXVPTRL (SEQ ID NO: 6573):SAIS (SEQ ID NO: 6360), HVPKPXXVPTKL (SEQ ID NO: 6509):SAIS (SEQ ID NO: 6360), RVPSTXXVPTKT (SEQ ID NO: 6555):SAIS (SEQ ID NO: 6360), ASAAPXXVPTAL (SEQ ID NO: 6469):SAIS (SEQ ID NO: 6360), ASASPXXVPTDL (SEQ ID NO: 6477):SAIS (SEQ ID NO: 6360), GIPEPXXVPEKM (SEQ ID NO: 6491):SAIS (SEQ ID NO: 6360), HVTKPTXAPTKL (SEQ ID NO: 6511):SAIS (SEQ ID NO: 6360), YVPKPXXAPTKL (SEQ ID NO: 6583):SAIS (SEQ ID NO: 6360), TVPKPXXAPTQL (SEQ ID NO: 6575):SAIS (SEQ ID NO: 6360), AVPKAXXAPTKL (SEQ ID NO: 6479):SAIS (SEQ ID NO: 6360), GSAGPXXTPTKM (SEQ ID NO: 6497):SAIS (SEQ ID NO: 6360), AAPASXXVPARL (SEQ ID NO: 6458):SAIS (SEQ ID NO: 6360), HVPKPXXAPTKL (SEQ ID NO: 6503):SAIS (SEQ ID NO: 6360), RVPSTXXAPVKT (SEQ ID NO: 6550):SAIS (SEQ ID NO: 6360), ASAAPXXVPQAL (SEQ ID NO: 6468):SAIS (SEQ ID NO: 6360), ASASPXXVSQDL (SEQ ID NO: 6478):SAIS (SEQ ID NO: 6360), ASASPXXVPQDL (SEQ ID NO: 6476):SAIS (SEQ ID NO: 6360), SSVKXQPSRVHH (SEQ ID NO: 6565):SAIS (SEQ ID NO: 6360), RNVQXRPTQVQL (SEQ ID NO: 6548):SAIS (SEQ ID NO: 6360), KIPKAXXAPTEL (SEQ ID NO: 6529):NAIS (SEQ ID NO: 6357), GIPEPXXAPTKM (SEQ ID NO: 6487):NAIS (SEQ ID NO: 6357), SIPKAXXAPTEL (SEQ ID NO: 6557):NAIS (SEQ ID NO: 6357), AVPKAXXAPTKL (SEQ ID NO: 6479):NAIS (SEQ ID NO: 6357), KVGKAXXAPTKL (SEQ ID NO: 6537):NAIS (SEQ ID NO: 6357), KASKAXXAPTKL (SEQ ID NO: 6521):NAIS (SEQ ID NO: 6357), GSAGPXXAPTKM (SEQ ID NO: 6495):NAIS (SEQ ID NO: 6357), AAPASXXAPTRL (SEQ ID NO: 6455):NAIS (SEQ ID NO: 6357), STPPTXXAPTRL (SEQ ID NO: 6567):NAIS (SEQ ID NO: 6357), RVPSTXXAPTKT (SEQ ID NO: 6549):NAIS (SEQ ID NO: 6357), ASAAPXXAPTAL (SEQ ID NO: 6463):NAIS (SEQ ID NO: 6357), ASASPXXAPTDL (SEQ ID NO: 6471):NAIS (SEQ ID NO: 6357), KIPKAXXVPTEL (SEQ ID NO: 6535):NAIS (SEQ ID NO: 6357), GIPEPXXVPEKM (SEQ ID NO: 6491):NAIS (SEQ ID NO: 6357), SIPKAXXVPTEL (SEQ ID NO: 6563):NAIS (SEQ ID NO: 6357), KVGKAXXVPTKL (SEQ ID NO: 6543):NAIS (SEQ ID NO: 6357), KASKAXXVPTKL (SEQ ID NO: 6527):NAIS (SEQ ID NO: 6357), GSAGPXXTPTKM (SEQ ID NO: 6497):NAIS (SEQ ID NO: 6357), AAPASXXVPARL (SEQ ID NO: 6458):NAIS (SEQ ID NO: 6357), STPPTXXVPTRL (SEQ ID NO: 6573):NAIS (SEQ ID NO: 6357), RVPSTXXAPVKT (SEQ ID NO: 6550):NAIS (SEQ ID NO: 6357), ASAAPXXVPQAL (SEQ ID NO: 6468):NAIS (SEQ ID NO: 6357), ASASPXXVSQDL (SEQ ID NO: 6478):NAIS (SEQ ID NO: 6357), ASASPXXVPQDL (SEQ ID NO: 6476):NAIS (SEQ ID NO: 6357), NDEGLEXVPTEE (SEQ ID NO: 6545):NAIS (SEQ ID NO: 6357), NDEGLEXVPTGQ (SEQ ID NO: 6546):NAIS (SEQ ID NO: 6357), SSVKXQPSRVHH (SEQ ID NO: 6565):NAIS (SEQ ID NO: 6357), RNVQXRPTQVQL (SEQ ID NO: 6548):NAIS (SEQ ID NO: 6357), KIPKAXXVPTEL (SEQ ID NO: 6535):SPIS (SEQ ID NO: 6364), GIPEPXXVPTKM (SEQ ID NO: 6493):SPIS (SEQ ID NO: 6364), SIPKAXXVPTEL (SEQ ID NO: 6563):SPIS (SEQ ID NO: 6364), HVTKPTXVPTKL (SEQ ID NO: 6519):SPIS (SEQ ID NO: 6364), YVPKPXXVPTKL (SEQ ID NO: 6589):SPIS (SEQ ID NO: 6364), TVPKPXXVPTQL (SEQ ID NO: 6581):SPIS (SEQ ID NO: 6364), AVPKAXXVPTKL (SEQ ID NO: 6485):SPIS (SEQ ID NO: 6364), KASKAXXVPTKL (SEQ ID NO: 6527):SPIS (SEQ ID NO: 6364), GSAGPXXVPTKM (SEQ ID NO: 6501):SPIS (SEQ ID NO: 6364), AAPASXXVPTRL (SEQ ID NO: 6461):SPIS (SEQ ID NO: 6364), STPPTXXVPTRL (SEQ ID NO: 6573):SPIS (SEQ ID NO: 6364), HVPKPXXVPTKL (SEQ ID NO: 6509):SPIS (SEQ ID NO: 6364), RVPSTXXVPTKT (SEQ ID NO: 6555):SPIS (SEQ ID NO: 6364), ASAAPXXVPTAL (SEQ ID NO: 6469):SPIS (SEQ ID NO: 6364), ASASPXXVPTDL (SEQ ID NO: 6477):SPIS (SEQ ID NO: 6364), GIPEPXXVPEKM (SEQ ID NO: 6491):SPIS (SEQ ID NO: 6364), HVTKPTXAPTKL (SEQ ID NO: 6511):SPIS (SEQ ID NO: 6364), YVPKPXXAPTKL (SEQ ID NO: 6583):SPIS (SEQ ID NO: 6364), TVPKPXXAPTQL (SEQ ID NO: 6575):SPIS (SEQ ID NO: 6364), AVPKAXXAPTKL (SEQ ID NO: 6479):SPIS (SEQ ID NO: 6364), GSAGPXXTPTKM (SEQ ID NO: 6497):SPIS (SEQ ID NO: 6364), AAPASXXVPARL (SEQ ID NO: 6458):SPIS (SEQ ID NO: 6364), HVPKPXXAPTKL (SEQ ID NO: 6503):SPIS (SEQ ID NO: 6364), RVPSTXXAPVKT (SEQ ID NO: 6550):SPIS (SEQ ID NO: 6364), ASAAPXXVPQAL (SEQ ID NO: 6468):SPIS (SEQ ID NO: 6364), ASASPXXVSQDL (SEQ ID NO: 6478):SPIS (SEQ ID NO: 6364), ASASPXXVPQDL (SEQ ID NO: 6476):SPIS (SEQ ID NO: 6364), SSVKXQPSRVHH (SEQ ID NO: 6565):SPIS (SEQ ID NO: 6364), RNVQXRPTQVQL (SEQ ID NO: 6548):SPIS (SEQ ID NO: 6364), and wherein X is C or S.

103. The peptide of claim 101, wherein PEP1 is selected from the group consisting of SAIS, NAIS and SPIS and said peptide comprises the amino acid sequence selected from the group consisting of SEQ ID NOs: 1 to 5, 8, 11, 12, 14 to 23, 25 to 35, 43, 44, 45, 46, 47, 48, 49, 85, 86, 95 to 102, 105 to 123, 155 to 181, 208 to 234, 293 to 352, 506, 507, 510, 511, 514, 515, 520, 521, 522, 523, 1071, 1074, 1076, 1077, 1144, 1145, 1147, 1154, 1155, 1158, 1159, 1162, 1163, 1181, 1182, 1183, 1185, 1186, 1188, 1189, 1190, 1191, 1194, 1196, 1199 to 1206, 1208 to 1215, 1218, 1221, 1223, 1224, 1227, 1228, 1229, 1230, 1231, 1232, 1233, 1235, 1236, 1237, 1238, 1240, 1241, 1243, 1244, 1245, 1246, 1248, 1249, 1250, 1251, 1252, 1253, 1254, 1256, 1260 to 1270, 1272, 1273, 1274, 1275, 1276, 1279, 1280, 1282, 1283, 1285 to 1303, 1306, 1307, 1309, 1310, 1311, 1312, 1314 to 1325, 1328, 1329, 1332, 1333, 1339 to 1349, 1351, 1352, 1353, 1354, 1355, 1356, 1358, 1359, 1360, 1361, 1362, 1363, 1365, 1368, 1369, 1370, 1371, 1372, 1374, 1375, 1376, 1377, 1379, 1382 to 1391, 1394 to 1407, 1409, 1411, 1412, 1415, 1417, 1418, 1419, 1421, 1423, 1424, 1426, 1427, 1428, 1429, 1430, 1431, 1432, 1434, 1436, 1439, 1440, 1443, 1445, 1446, 1448, 1449, 1450, 1451, 1452, 1453, 1454, 1455, 1456, 1457, 1459, 1461, 1465, 1467, 1468, 1470, 1472 to 1482, 1484, 1485, 1487, 1489, 1490, 1870, 1871, 1872, 1873, 1877, 1880, 1882, 1884, 1885, 1886, 1888, 1889, 1890, 1896, 1897, 1900, 1901, 1902, 1904, 1907, 1909, 1913, 1916, 1917, 1919, 1920, 1922, 1926, 1929, 1931, 1933, 1936, 1937, 1940, 1941, 1942, 1943, 1946, 1947, 1948, 1950, 1951, 1956, 1957, 1958, 1959, 1960, 1961, 1964, 1965, 1967, 1968, 1969, 1972, 1973, 1974, 1975, 1976, 1980, 1985, 1986, 1987, 1989, 1991, 1992, 1994, 1995, 2000, 2001, 2002, 2003, 2005, 2007, 2008, 2009, 2010, 2011, 2012, 2013, 2015, 2016, 2019, 2020, 2023, 2024, 2025, 2028 to 2044, 2047, 2049, 2050, 2051, 2055, 2057, 2058, 2060, 2061, 2062, 2063, 2064, 2066, 2069, 2071, 2072, 2073, 2074, 2079, 2082, 2083, 2084, 2085, 2086, 2087, 2088, 2089, 2092, 2093, 2094, 2096, 2097, 2099, 2100, 2102, 2103, 2105, 2106, 2108, 2109, 2110, 2111, 2113, 2115, 2116, 2119, 2121 to 2130, 2132, 2137, 2138, 2140, 2142, 2145, 2146, 2147, 2148, 2149, 2150, 2154, 2156, 2157, 2158, 2159, 2160, 2161, 2163, 2164, 2165, 2166, 2167, 2168, 2170, 2172, 2178, 2179, 2180, 2181, 2182, 2183, 2191, 2192, 2195, 2197, 2198, 2199, 2200, 2808, 2809, 2810, 2811, 2812, 2814, 2817, 2819, 2824, 2825, 2826, 2827, 2828, 2829, 2831, 2833, 2835, 2837, 2838, 2839, 2841, 2843, 2846, 2849, 2853, 2855, 2856, 2858, 2860, 2862, 2863, 2864, 2865, 2867, 2869, 2870, 2871, 2872, 2873, 2875, 2876, 2879, 2880, 2881, 2883 to 2891, 2895, 2896, 2897, 2899, 2900, 2901, 2904 to 2911, 2913 to 2920, 2922, 2923, 2925, 2926, 2927, 2928, 2929, 2931, 2933, 2934, 2935, 2936, 2938, 2940, 2941, 2942, 2944, 2946, 2947, 2949, 2953, 2954, 2960, 2962 to 2968, 2970, 2971, 2973, 2974, 2975, 2976, 2979, 2980, 2981, 2983, 2984, 2985, 2986, 2987, 2988, 2990 to 3002, 3004 to 3010, 3012 to 3020, 3022, 3023, 3026, 3029, 3030, 3031, 3032, 3033, 3034, 3035, 3037, 3038, 3039, 3041 to 3049, 3051, 3052, 3053, 3054, 3055, 3056, 3057, 3059 to 3071, 3073, 3074, 3075, 3077, 3079, 3080, 3081, 3083, 3085, 3087, 3089, 3090, 3092 to 3099, 3101, 3103 to 3112, 3114, 3116, 3118, 3119, 3120, 3121, 3122, 3124 to 3132, 3134, 3135, 3136, 3137, 3139 to 3151, 3153, 3154, 3155, 3156, 3158, 3159, 3160, 3162, 3164, 3363 to 3424, 3429, 3430, 3432, 3438, 3439, 3441, 3443, 3444, 3445, 3446, 3447, 3448, 3452, 3455, 3456, 3457, 3458, 3459, 3460, 3463, 3465, 3467, 3472, 3474, 3481, 3482, 3483, 3484, 3487, 3490, 3491, 3493, 3495, 3496, 3497, 3499, 3502, 3506, 3508, 3510, 3513, 3514, 3515, 3518, 3519, 3523, 3525, 3526, 3527, 3528, 3529, 3532, 3533, 3534, 3537, 3539, 3540, 3541, 3542, 3543, 3547, 3548, 3550, 3554 to 3563, 3567, 3568, 3569, 3572, 3573, 3574, 3575, 3576, 3579, 3581, 3583, 3585, 3587, 3588, 3593, 3595, 3597, 3599, 3602, 3603, 3605, 3606, 3607, 3609, 3613, 3614, 3615, 3616, 3617, 3625, 3626, 3627, 3628, 3629, 3631, 3632, 3634, 3635, 3636, 3637, 3638, 3640, 3642, 3643, 3644, 3645, 3646, 3647, 3648, 3652, 3653, 3654, 3655, 3656, 3659, 3661, 3662, 3664, 3671 to 3684, 3688, 3690, 3691, 3692, 3696, 3697, 3704, 3707, 3708, 3710, 3711, 3713, 3714, 3715, 3716, 3718, 3719, 3720, 4527 to 4607, 4721, 4723, 4725, 4732, 4736, 4738, 4739, 4740, 4742, 4746, 4751, 4753, 4756, 4757, 4759, 4765, 4771, 4774, 4781, 4785, 4789, 4791, 4799, 4806, 4808, 4810, 4814, 4816, 4822, 4823, 4824, 4825, 4827, 4828, 4829, 4830, 4832, 4834, 4836, 4840, 4842, 4843, 4847, 4850, 4856, 4858, 4860, 4864, 4880, 4881, 4882, 4886, 4887, 4888, 4891, 4893, 4894, 4895, 4899, 4900, 4902, 4909, 4910, 4911, 4915, 4916, 4919, 4920, 4921, 4924, 4925, 4929, 4931, 4933, 4935, 4937, 4941, 4943, 4944, 4945, 4948, 4949, 4950, 4955, 4956, 4957, 4959, 4960, 4961, 4963, 4964, 4966, 4967, 4970, 4971, 4972, 4973, 4974, 4977, 4978, 4986, 4990, 4993, 4994, 4995, 4999, 5002, 5005, 5006, 5009, 5010, 5015, 5016, 5017, 5019, 5023, 5024, 5026, 5031, 5033, 5034, 5035, 5038, 5042, 5044, 5047, 5049, 5050, 5056, 5058, 5059, 5062, 5065, 5067, 5069, 5070, 5073, 5078, 5082, 5085, 5088, 5092, 5099, 5101, 5105, 5108, 5109, 5112, 5114, 5118, 5122, 5123, 5127, 5128, 5129, 5131, 5132, 5133, 5134, 5137, 5140, 5142, 5147, 5150, 5153, 5154, 5157, 5158, 5160, 5164, 5165, 5167, 5169, 5170, 5171, 5175, 5182, 5185, 5187, 5189, 5191, 5192, 5193, 5197, 5198, 5199, 5201, 5202, 5205, 5207, 5210, 5211, 5212, 5214, 5218, 5220, 5222, 5223, 5225, 5229, 5231, 5233, 5237, 5241, 5242, 5244, 5247, 5250, 5254, 5255, 5257, 5258, 5260, 5261, 5262, 5263, 5265, 5270, 5280, 5288, 5290, 5291, 5293, 5294, 5295, 5299, 5304, 5305, 5306, 5307, 5308, 5310, 5314, 5316, 5318, 5325, 5329, 5337, 5339, 5340, 5343, 5344, 5346, 5353, 5358, 5360, 5361, 5362, 5366, 5369, 5370, 5372, 5374, 5375, 5376, 5379, 5380, 5381, 5384, 5385, 5386, 5393, 5397, and 5645 to 5909.

104. The peptide of claim 101, that comprises a peptide PEP9, wherein PEP1 is SAIS and wherein the pair PEP9:PEP1 is selected from the group consisting of GIPEPXXVPTKM (SEQ ID NO: 6493):SAIS (SEQ ID NO: 6360), HVTKPTXVPTKL (SEQ ID NO: 6519):SAIS (SEQ ID NO: 6360), YVPKPXXVPTKL (SEQ ID NO: 6589):SAIS (SEQ ID NO: 6360), TVPKPXXVPTQL (SEQ ID NO: 6581):SAIS (SEQ ID NO: 6360), AVPKAXXVPTKL (SEQ ID NO: 6485):SAIS (SEQ ID NO: 6360), KVGKAXXVPTKL (SEQ ID NO: 6543):SAIS (SEQ ID NO: 6360), KASKAXXVPTKL (SEQ ID NO: 6527):SAIS (SEQ ID NO: 6360), GSAGPXXVPTKM (SEQ ID NO: 6501):SAIS (SEQ ID NO: 6360), AAPASXXVPTRL (SEQ ID NO: 6461):SAIS (SEQ ID NO: 6360), STPPTXXVPTRL (SEQ ID NO: 6573):SAIS (SEQ ID NO: 6360), HVPKPXXVPTKL (SEQ ID NO: 6509):SAIS (SEQ ID NO: 6360), RVPSTXXVPTKT (SEQ ID NO: 6555):SAIS (SEQ ID NO: 6360), ASAAPXXVPTAL (SEQ ID NO: 6469):SAIS (SEQ ID NO: 6360), ASASPXXVPTDL (SEQ ID NO: 6477):SAIS (SEQ ID NO: 6360), GIPEPXXVPEKM (SEQ ID NO: 6491):SAIS (SEQ ID NO: 6360), HVTKPTXAPTKL (SEQ ID NO: 6511):SAIS (SEQ ID NO: 6360), YVPKPXXAPTKL (SEQ ID NO: 6583):SAIS (SEQ ID NO: 6360), TVPKPXXAPTQL (SEQ ID NO: 6575):SAIS (SEQ ID NO: 6360), AVPKAXXAPTKL (SEQ ID NO: 6479):SAIS (SEQ ID NO: 6360), GSAGPXXTPTKM (SEQ ID NO: 6497):SAIS (SEQ ID NO: 6360), AAPASXXVPARL (SEQ ID NO: 6458):SAIS (SEQ ID NO: 6360), HVPKPXXAPTKL (SEQ ID NO: 6503):SAIS (SEQ ID NO: 6360), RVPSTXXAPVKT (SEQ ID NO: 6550):SAIS (SEQ ID NO: 6360), ASAAPXXVPQAL (SEQ ID NO: 6468):SAIS (SEQ ID NO: 6360), ASASPXXVSQDL (SEQ ID NO: 6478):SAIS (SEQ ID NO: 6360), ASASPXXVPQDL (SEQ ID NO: 6476):SAIS (SEQ ID NO: 6360), SSVKXQPSRVHH (SEQ ID NO: 6565):SAIS (SEQ ID NO: 6360) and RNVQXRPTQVQL (SEQ ID NO: 6548):SAIS (SEQ ID NO: 6360),

105. The peptide of claim 101, wherein PEP1 is SAIS and said peptide comprises the amino acid sequence selected from the group consisting of SEQ ID NOs: 1, 2, 3, 12, 14, 15, 18 to 23, 26, 27, 28, 33, 34, 35, 95, 96, 102, 105 to 123, 506, 507, 1071, 1144, 1154, 1155, 1181, 1182, 1188, 1190, 1191, 1199, 1202, 1203, 1205, 1206, 1208, 1211, 1212, 1213, 1214, 1229, 1230, 1231, 1235, 1236, 1238, 1243, 1244, 1248, 1252, 1256, 1262, 1263, 1268, 1272, 1275, 1286, 1288, 1291, 1292, 1294, 1295, 1296, 1299, 1300, 1302, 1306, 1307, 1309, 1310, 1311, 1316, 1317, 1319, 1320, 1333, 1345, 1347, 1349, 1354, 1358, 1359, 1361, 1363, 1368, 1369, 1370, 1371, 1374, 1376, 1379, 1382, 1384, 1390, 1391, 1397, 1399, 1401, 1402, 1426, 1428, 1430, 1445, 1449, 1451, 1453, 1476, 1479, 1484, 1487, 1871, 1877, 1882, 1884, 1885, 1902, 1904, 1909, 1916, 1917, 1926, 1936, 1943, 1946, 1964, 1965, 1969, 1974, 1975, 1976, 1985, 1987, 1994, 2002, 2012, 2016, 2019, 2028, 2030, 2032, 2034, 2038, 2039, 2041, 2042, 2049, 2055, 2060, 2061, 2066, 2073, 2082, 2083, 2084, 2086, 2094, 2096, 2099, 2100, 2102, 2103, 2105, 2109, 2110, 2116, 2119, 2123, 2125, 2126, 2145, 2147, 2148, 2150, 2158, 2160, 2163, 2164, 2166, 2181, 2183, 2192, 2198, 5646, 5648, 5649, 5650, 5653, 5654, 5659, 5660, 5661, 5663, 5664, 5667, 5668, 5671, 5672, 5673, 5674, 5675, 5676, 5680, 5683, 5684, 5685, 5686, 5687, 5689, 5693, 5694, 5696, 5699, 5700, 5701, 5702, 5705, 5706, 5707, 5710, 5713, 5714, 5715, 5716, 5718, 5719, 5721, 5722, 5724, 5725, 5726, 5729, 5730, 5732, 5733, 5734, 5735, 5736, 5737, 5742, 5744, 5748, 5751, 5752, 5753, 5754, 5758, 5760, 5763, 5764, 5766, 5767, 5771, 5774, 5775, 5776, 5779, 5780, 5783, 5785, 5786, 5787, 5788, 5789, 5792, 5793, 5794, 5795, 5796, 5798, 5799, 5800, 5804, 5807, 5808, 5809, 5811, 5817, 5819, 5822, 5823, 5825, 5827, 5828, 5831, 5832, 5836, 5837, 5839, 5840, 5841, 5842, 5845, 5846, 5851, 5856, 5859, 5860, 5866, 5867, 5868, 5871, 5873, 5874, 5875, 5877, 5878, 5881, 5883, 5884, 5885, 5886, 5891, 5892, 5894, 5896, 5897, 5898, 5899, 5901, 5903, 5904, 5906, and 5907.

106. The peptide of claim 101, wherein the peptide is up to 25 amino acids in length.

107. A peptide that is up to 30 amino acids in length and that comprises: the amino acid sequence selected from the group consisting of SEQ ID NOs: 1 to 5, 8, 11, 12, 14 to 23, 25 to 35, 43, 44, 45, 46, 47, 48, 49, 85, 86, 95 to 102, 105 to 123, 155 to 181, 208 to 234, 293 to 352, 506, 507, 510, 511, 514, 515, 520, 521, 522, 523, 1071, 1074, 1076, 1077, 1144, 1145, 1147, 1154, 1155, 1158, 1159, 1162, 1163, 1181, 1182, 1183, 1185, 1186, 1188, 1189, 1190, 1191, 1194, 1196, 1199 to 1206, 1208 to 1215, 1218, 1221, 1223, 1224, 1227, 1228, 1229, 1230, 1231, 1232, 1233, 1235, 1236, 1237, 1238, 1240, 1241, 1243, 1244, 1245, 1246, 1248, 1249, 1250, 1251, 1252, 1253, 1254, 1256, 1260 to 1270, 1272, 1273, 1274, 1275, 1276, 1279, 1280, 1282, 1283, 1285 to 1303, 1306, 1307, 1309, 1310, 1311, 1312, 1314 to 1325, 1328, 1329, 1332, 1333, 1339 to 1349, 1351, 1352, 1353, 1354, 1355, 1356, 1358, 1359, 1360, 1361, 1362, 1363, 1365, 1368, 1369, 1370, 1371, 1372, 1374, 1375, 1376, 1377, 1379, 1382 to 1391, 1394 to 1407, 1409, 1411, 1412, 1415, 1417, 1418, 1419, 1421, 1423, 1424, 1426, 1427, 1428, 1429, 1430, 1431, 1432, 1434, 1436, 1439, 1440, 1443, 1445, 1446, 1448, 1449, 1450, 1451, 1452, 1453, 1454, 1455, 1456, 1457, 1459, 1461, 1465, 1467, 1468, 1470, 1472 to 1482, 1484, 1485, 1487, 1489, 1490, 1870, 1871, 1872, 1873, 1877, 1880, 1882, 1884, 1885, 1886, 1888, 1889, 1890, 1896, 1897, 1900, 1901, 1902, 1904, 1907, 1909, 1913, 1916, 1917, 1919, 1920, 1922, 1926, 1929, 1931, 1933, 1936, 1937, 1940, 1941, 1942, 1943, 1946, 1947, 1948, 1950, 1951, 1956, 1957, 1958, 1959, 1960, 1961, 1964, 1965, 1967, 1968, 1969, 1972, 1973, 1974, 1975, 1976, 1980, 1985, 1986, 1987, 1989, 1991, 1992, 1994, 1995, 2000, 2001, 2002, 2003, 2005, 2007, 2008, 2009, 2010, 2011, 2012, 2013, 2015, 2016, 2019, 2020, 2023, 2024, 2025, 2028 to 2044, 2047, 2049, 2050, 2051, 2055, 2057, 2058, 2060, 2061, 2062, 2063, 2064, 2066, 2069, 2071, 2072, 2073, 2074, 2079, 2082, 2083, 2084, 2085, 2086, 2087, 2088, 2089, 2092, 2093, 2094, 2096, 2097, 2099, 2100, 2102, 2103, 2105, 2106, 2108, 2109, 2110, 2111, 2113, 2115, 2116, 2119, 2121 to 2130, 2132, 2137, 2138, 2140, 2142, 2145, 2146, 2147, 2148, 2149, 2150, 2154, 2156, 2157, 2158, 2159, 2160, 2161, 2163, 2164, 2165, 2166, 2167, 2168, 2170, 2172, 2178, 2179, 2180, 2181, 2182, 2183, 2191, 2192, 2195, 2197, 2198, 2199, 2200, 2808, 2809, 2810, 2811, 2812, 2814, 2817, 2819, 2824, 2825, 2826, 2827, 2828, 2829, 2831, 2833, 2835, 2837, 2838, 2839, 2841, 2843, 2846, 2849, 2853, 2855, 2856, 2858, 2860, 2862, 2863, 2864, 2865, 2867, 2869, 2870, 2871, 2872, 2873, 2875, 2876, 2879, 2880, 2881, 2883 to 2891, 2895, 2896, 2897, 2899, 2900, 2901, 2904 to 2911, 2913 to 2920, 2922, 2923, 2925, 2926, 2927, 2928, 2929, 2931, 2933, 2934, 2935, 2936, 2938, 2940, 2941, 2942, 2944, 2946, 2947, 2949, 2953, 2954, 2960, 2962 to 2968, 2970, 2971, 2973, 2974, 2975, 2976, 2979, 2980, 2981, 2983, 2984, 2985, 2986, 2987, 2988, 2990 to 3002, 3004 to 3010, 3012 to 3020, 3022, 3023, 3026, 3029, 3030, 3031, 3032, 3033, 3034, 3035, 3037, 3038, 3039, 3041 to 3049, 3051, 3052, 3053, 3054, 3055, 3056, 3057, 3059 to 3071, 3073, 3074, 3075, 3077, 3079, 3080, 3081, 3083, 3085, 3087, 3089, 3090, 3092 to 3099, 3101, 3103 to 3112, 3114, 3116, 3118, 3119, 3120, 3121, 3122, 3124 to 3132, 3134, 3135, 3136, 3137, 3139 to 3151, 3153, 3154, 3155, 3156, 3158, 3159, 3160, 3162, 3164, 3363 to 3424, 3429, 3430, 3432, 3438, 3439, 3441, 3443, 3444, 3445, 3446, 3447, 3448, 3452, 3455, 3456, 3457, 3458, 3459, 3460, 3463, 3465, 3467, 3472, 3474, 3481, 3482, 3483, 3484, 3487, 3490, 3491, 3493, 3495, 3496, 3497, 3499, 3502, 3506, 3508, 3510, 3513, 3514, 3515, 3518, 3519, 3523, 3525, 3526, 3527, 3528, 3529, 3532, 3533, 3534, 3537, 3539, 3540, 3541, 3542, 3543, 3547, 3548, 3550, 3554 to 3563, 3567, 3568, 3569, 3572, 3573, 3574, 3575, 3576, 3579, 3581, 3583, 3585, 3587, 3588, 3593, 3595, 3597, 3599, 3602, 3603, 3605, 3606, 3607, 3609, 3613, 3614, 3615, 3616, 3617, 3625, 3626, 3627, 3628, 3629, 3631, 3632, 3634, 3635, 3636, 3637, 3638, 3640, 3642, 3643, 3644, 3645, 3646, 3647, 3648, 3652, 3653, 3654, 3655, 3656, 3659, 3661, 3662, 3664, 3671 to 3684, 3688, 3690, 3691, 3692, 3696, 3697, 3704, 3707, 3708, 3710, 3711, 3713, 3714, 3715, 3716, 3718, 3719, 3720, 4527 to 4607, 4721, 4723, 4725, 4732, 4736, 4738, 4739, 4740, 4742, 4746, 4751, 4753, 4756, 4757, 4759, 4765, 4771, 4774, 4781, 4785, 4789, 4791, 4799, 4806, 4808, 4810, 4814, 4816, 4822, 4823, 4824, 4825, 4827, 4828, 4829, 4830, 4832, 4834, 4836, 4840, 4842, 4843, 4847, 4850, 4856, 4858, 4860, 4864, 4880, 4881, 4882, 4886, 4887, 4888, 4891, 4893, 4894, 4895, 4899, 4900, 4902, 4909, 4910, 4911, 4915, 4916, 4919, 4920, 4921, 4924, 4925, 4929, 4931, 4933, 4935, 4937, 4941, 4943, 4944, 4945, 4948, 4949, 4950, 4955, 4956, 4957, 4959, 4960, 4961, 4963, 4964, 4966, 4967, 4970, 4971, 4972, 4973, 4974, 4977, 4978, 4986, 4990, 4993, 4994, 4995, 4999, 5002, 5005, 5006, 5009, 5010, 5015, 5016, 5017, 5019, 5023, 5024, 5026, 5031, 5033, 5034, 5035, 5038, 5042, 5044, 5047, 5049, 5050, 5056, 5058, 5059, 5062, 5065, 5067, 5069, 5070, 5073, 5078, 5082, 5085, 5088, 5092, 5099, 5101, 5105, 5108, 5109, 5112, 5114, 5118, 5122, 5123, 5127, 5128, 5129, 5131, 5132, 5133, 5134, 5137, 5140, 5142, 5147, 5150, 5153, 5154, 5157, 5158, 5160, 5164, 5165, 5167, 5169, 5170, 5171, 5175, 5182, 5185, 5187, 5189, 5191, 5192, 5193, 5197, 5198, 5199, 5201, 5202, 5205, 5207, 5210, 5211, 5212, 5214, 5218, 5220, 5222, 5223, 5225, 5229, 5231, 5233, 5237, 5241, 5242, 5244, 5247, 5250, 5254, 5255, 5257, 5258, 5260, 5261, 5262, 5263, 5265, 5270, 5280, 5288, 5290, 5291, 5293, 5294, 5295, 5299, 5304, 5305, 5306, 5307, 5308, 5310, 5314, 5316, 5318, 5325, 5329, 5337, 5339, 5340, 5343, 5344, 5346, 5353, 5358, 5360, 5361, 5362, 5366, 5369, 5370, 5372, 5374, 5375, 5376, 5379, 5380, 5381, 5384, 5385, 5386, 5393, 5397, and 5645 to 5909; and
at least one biomaterial-affinity-containing group, wherein said at least one biomaterial-affinity-containing group provides said peptide, with the ability to covalently or non-covalently interact with a biomaterial.

108. A functionalized biomaterial comprising at least one peptide according to claim 101, and a biomaterial.

109. A medical composition comprising at least one peptide according to claim 101, and a medically acceptable carrier.

110. A medical composition comprising at least one peptide according to claim 107, and a medically acceptable carrier.

111. A medical composition comprising at least one functionalized biomaterial according to claim 108, and a medically acceptable carrier.

112. A functionalized biomaterial according to claim 108, wherein said biomaterial has a stiffness of at least 0.01 kPa and not more than 5 GPa.

113. A functionalized biomaterial according to claim 108, wherein said biomaterial is selected from the group consisting of metals and alloys, ceramics, polymeric biomaterials, and biocomposite materials.

114. A functionalized biomaterial according to claim 108, wherein said biomaterial is selected from the group consisting of a solid ceramic component, a collagen and a biodegradable hydrogel.

115. A method of inducing cell differentiation, tissue regeneration, or tissue formation comprising:
administering an effective amount of a peptide to a mesenchymal stem cell or progenitor cell at any stage of differentiation thereof,
wherein said method is selected from the group consisting of a pharmaceutical method, a surgical method, a dermatological method, a prophylactic method, an imaging method and any combination thereof,
wherein the administration is in vitro, ex vivo or in vivo, and wherein the peptide is up to 30 amino acids in length and comprises a peptide with four amino acids, PEP1;
wherein PEP1 is selected from the group consisting of SAIS, NAIS and SPIS;
wherein the RMSD value of the structure coordinates of said peptide or peptidomimetic with respect to PEPREF is 2.45 Å (Angstroms) or less;
and wherein PEPREF is

| | | | | | | | | |
|---|---|---|---|---|---|---|---|---|
| ATOM | 511 | N | LYS | A | 1 | −14.570 | 46.437 | 27.424 |
| ATOM | 512 | CA | LYS | A | 1 | −13.512 | 45.748 | 28.151 |
| ATOM | 513 | C | LYS | A | 1 | −13.655 | 44.259 | 27.884 |
| ATOM | 514 | O | LYS | A | 1 | −12.769 | 43.463 | 28.197 |
| ATOM | 515 | CB | LYS | A | 1 | −13.605 | 46.029 | 29.652 |
| ATOM | 516 | CG | LYS | A | 1 | −13.640 | 47.509 | 29.991 |
| ATOM | 517 | CD | LYS | A | 1 | −12.615 | 48.297 | 29.183 |
| ATOM | 518 | CE | LYS | A | 1 | −12.625 | 49.768 | 29.575 |
| ATOM | 519 | NZ | LYS | A | 1 | −13.994 | 50.369 | 29.497 |
| ATOM | 520 | N | ILE | A | 2 | −14.792 | 43.890 | 27.309 |
| ATOM | 521 | CA | ILE | A | 2 | −15.051 | 42.499 | 26.967 |
| ATOM | 522 | C | ILE | A | 2 | −14.911 | 42.370 | 25.444 |
| ATOM | 523 | O | ILE | A | 2 | −15.531 | 43.125 | 24.683 |
| ATOM | 524 | CB | ILE | A | 2 | −16.466 | 42.065 | 27.401 |
| ATOM | 525 | CG1 | ILE | A | 2 | −16.630 | 42.238 | 28.915 |
| ATOM | 526 | CG2 | ILE | A | 2 | −16.710 | 40.629 | 26.985 |
| ATOM | 527 | CD1 | ILE | A | 2 | −15.631 | 41.478 | 29.30 |
| ATOM | 528 | N | PRO | A | 3 | −14.085 | 41.411 | 24.989 |
| ATOM | 529 | CA | PRO | A | 3 | −13.789 | 41.109 | 23.588 |
| ATOM | 530 | C | PRO | A | 3 | −14.998 | 40.695 | 22.768 |
| ATOM | 531 | O | PRO | A | 3 | −15.969 | 40.164 | 23.305 |
| ATOM | 532 | CB | PRO | A | 3 | −12.785 | 39.968 | 23.688 |
| ATOM | 533 | CG | PRO | A | 3 | −12.156 | 40.166 | 25.007 |
| ATOM | 534 | CD | PRO | A | 3 | −13.330 | 40.506 | 25.867 |
| ATOM | 535 | N | LYS | A | 4 | −14.937 | 40.937 | 21.463 |
| ATOM | 536 | CA | LYS | A | 4 | −16.023 | 40.529 | 20.590 |
| ATOM | 537 | C | LYS | A | 4 | −15.886 | 39.015 | 20.391 |
| ATOM | 538 | O | LYS | A | 4 | −14.903 | 38.415 | 20.831 |
| ATOM | 539 | CB | LYS | A | 4 | −15.926 | 41.244 | 19.245 |
| ATOM | 540 | CG | LYS | A | 4 | −15.802 | 42.751 | 19.355 |
| ATOM | 541 | CD | LYS | A | 4 | −16.292 | 43.433 | 18.083 |
| ATOM | 542 | CE | LYS | A | 4 | −16.162 | 44.943 | 18.177 |
| ATOM | 543 | NZ | LYS | A | 4 | −16.825 | 45.628 | 17.019 |
| ATOM | 544 | N | ALA | A | 5 | −16.85 | 38.393 | 19.759 |
| ATOM | 545 | CA | ALA | A | 5 | −16.811 | 36.955 | 19.507 |
| ATOM | 546 | C | ALA | A | 5 | −15.772 | 36.771 | 18.416 |
| ATOM | 547 | O | ALA | A | 5 | −15.727 | 37.534 | 17.455 |
| ATOM | 548 | CB | ALA | A | 5 | −18.168 | 36.419 | 19.043 |
| ATOM | 549 | N | CYS | A | 6 | −14.935 | 35.756 | 18.562 |
| ATOM | 550 | CA | CYS | A | 6 | −13.887 | 35.518 | 17.584 |
| ATOM | 551 | C | CYS | A | 6 | −14.347 | 34.765 | 16.338 |
| ATOM | 552 | O | CYS | A | 6 | −15.327 | 34.018 | 16.368 |
| ATOM | 553 | CB | CYS | A | 6 | −12.743 | 34.768 | 18.241 |
| ATOM | 554 | SG | CYS | A | 6 | −11.198 | 34.959 | 17.353 |
| ATOM | 555 | N | CYS | A | 7 | −13.623 | 34.973 | 15.243 |
| ATOM | 556 | CA | CYS | A | 7 | −13.931 | 34.328 | 13.969 |
| ATOM | 557 | C | CYS | A | 7 | −13.091 | 33.071 | 13.798 |
| ATOM | 558 | O | CYS | A | 7 | −11.961 | 33.123 | 13.302 |
| ATOM | 559 | CB | CYS | A | 7 | −13.653 | 35.290 | 12.824 |
| ATOM | 560 | SG | CYS | A | 7 | −13.930 | 34.633 | 11.154 |
| ATOM | 561 | N | VAL | A | 8 | −13.654 | 31.941 | 14.209 |
| ATOM | 562 | CA | VAL | A | 8 | −12.949 | 30.684 | 14.110 |
| ATOM | 563 | C | VAL | A | 8 | −13.653 | 29.733 | 13.157 |
| ATOM | 564 | O | VAL | A | 8 | −14.759 | 30.016 | 12.687 |
| ATOM | 565 | CB | VAL | A | 8 | −12.814 | 30.038 | 15.492 |
| ATOM | 566 | CG1 | VAL | A | 8 | −11.807 | 30.825 | 16.337 |
| ATOM | 567 | CG2 | VAL | A | 8 | −14.161 | 30.006 | 16.170 |
| ATOM | 568 | N | PRO | A | 9 | −13.003 | 28.601 | 12.828 |
| ATOM | 569 | CA | PRO | A | 9 | −13.593 | 27.615 | 11.918 |
| ATOM | 570 | C | PRO | A | 9 | −14.726 | 26.886 | 12.631 |
| ATOM | 571 | O | PRO | A | 9 | −14.581 | 26.476 | 13.780 |
| ATOM | 572 | CB | PRO | A | 9 | −12.423 | 26.676 | 11.601 |
| ATOM | 573 | CG | PRO | A | 9 | −11.204 | 27.487 | 11.925 |
| ATOM | 574 | CD | PRO | A | 9 | −11.620 | 28.226 | 13.163 |
| ATOM | 575 | N | THR | A | 10 | −15.847 | 26.721 | 11.942 |
| ATOM | 576 | CA | THR | A | 10 | −16.999 | 26.060 | 12.527 |
| ATOM | 577 | C | THR | A | 10 | −17.334 | 24.767 | 11.804 |
| ATOM | 578 | O | THR | A | 10 | −18.097 | 23.943 | 12.303 |
| ATOM | 579 | CB | THR | A | 10 | −18.211 | 27.010 | 12.523 |
| ATOM | 580 | OG1 | THR | A | 10 | −18.491 | 27.445 | 11.185 |
| ATOM | 581 | CG2 | THR | A | 10 | −17.902 | 28.230 | 13.375 |
| ATOM | 582 | N | GLU | A | 11 | −16.750 | 24.586 | 10.627 |
| ATOM | 583 | CA | GLU | A | 11 | −16.980 | 23.377 | 9.848 |
| ATOM | 584 | C | GLU | A | 11 | −15.643 | 22.935 | 9.246 |
| ATOM | 585 | O | GLU | A | 11 | −15.029 | 23.666 | 8.464 |
| ATOM | 586 | CB | GLU | A | 11 | −17.981 | 23.624 | 8.715 |
| ATOM | 587 | CG | GLU | A | 11 | −19.421 | 23.807 | 9.163 |
| ATOM | 588 | CD | GLU | A | 11 | −19.686 | 25.166 | 9.770 |
| ATOM | 589 | OE1 | GLU | A | 11 | −19.478 | 26.175 | 9.073 |
| ATOM | 590 | OE2 | GLU | A | 11 | −20.111 | 25.227 | 10.939 |
| ATOM | 591 | N | LEU | A | 12 | −15.183 | 21.749 | 9.622 |
| ATOM | 592 | CA | LEU | A | 12 | −13.923 | 21.254 | 9.104 |
| ATOM | 593 | C | LEU | A | 12 | −14.062 | 19.912 | 8.386 |
| ATOM | 594 | O | LEU | A | 12 | −15.136 | 19.299 | 8.359 |
| ATOM | 595 | CB | LEU | A | 12 | −12.893 | 21.144 | 10.230 |
| ATOM | 596 | CG | LEU | A | 12 | −12.660 | 22.422 | 11.054 |
| ATOM | 597 | CD1 | LEU | A | 12 | −13.475 | 22.350 | 12.337 |
| ATOM | 598 | CD2 | LEU | A | 12 | −11.181 | 22.586 | 11.399 |
| ATOM | 599 | N | SER | A | 13 | −12.971 | 19.476 | 7.771 |
| ATOM | 600 | CA | SER | A | 13 | −12.964 | 18.218 | 7.046 |
| ATOM | 601 | C | SER | A | 13 | −11.568 | 17.628 | 7.164 |
| ATOM | 602 | O | SER | A | 13 | −10.613 | 18.320 | 7.550 |
| ATOM | 603 | CB | SER | A | 13 | −13.346 | 18.435 | 5.578 |
| ATOM | 604 | OG | SER | A | 13 | −12.404 | 19.261 | 4.923 |
| ATOM | 605 | N | ALA | A | 13 | −11.449 | 16.352 | 6.818 |
| ATOM | 606 | CA | ALA | A | 13 | −10.179 | 15.665 | 6.949 |
| ATOM | 607 | C | ALA | A | 13 | −9.421 | 15.471 | 5.652 |
| ATOM | 608 | O | ALA | A | 13 | −9.941 | 15.720 | 4.563 |
| ATOM | 609 | CB | ALA | A | 13 | −10.413 | 14.306 | 7.626 |
| ATOM | 610 | N | ILE | A | 14 | −8.171 | 15.046 | 5.783 |
| ATOM | 611 | CA | ILE | A | 14 | −7.343 | 14.746 | 4.623 |
| ATOM | 612 | C | ILE | A | 14 | −6.475 | 13.559 | 5.004 |
| ATOM | 613 | O | ILE | A | 14 | −6.212 | 13.316 | 6.183 |
| ATOM | 614 | CB | ILE | A | 14 | −6.401 | 15.916 | 4.183 |
| ATOM | 615 | CG1 | ILE | A | 14 | −5.284 | 16.106 | 5.200 |
| ATOM | 616 | CG2 | ILE | A | 14 | −7.188 | 17.211 | 3.982 |
| ATOM | 617 | CD1 | ILE | A | 14 | −4.173 | 16.973 | 4.696 |
| ATOM | 618 | N | SER | A | 15 | −6.045 | 12.806 | 3.999 |
| ATOM | 619 | CA | SER | A | 15 | −5.187 | 11.662 | 4.242 |
| ATOM | 620 | C | SER | A | 15 | −3.740 | 12.089 | 4.217 |
| ATOM | 621 | O | SER | A | 15 | −3.360 | 13.020 | 3.508 |
| ATOM | 622 | CB | SER | A | 15 | −5.416 | 10.584 | 3.185 |
| ATOM | 623 | OG | SER | A | 15 | −6.667 | 9.971 | 3.401 |
| ATOM | 624 | N | MET | A | 16 | −2.933 | 11.409 | 5.012 |
| ATOM | 625 | CA | MET | A | 16 | −1.518 | 11.700 | 5.047 |
| ATOM | 626 | C | MET | A | 16 | −0.778 | 10.414 | 5.244 |
| ATOM | 627 | O | MET | A | 16 | −1.137 | 9.594 | 6.078 |
| ATOM | 628 | CB | MET | A | 16 | −1.170 | 12.694 | 6.164 |
| ATOM | 629 | CG | MET | A | 16 | −1.848 | 14.042 | 5.974 |
| ATOM | 630 | SD | MET | A | 16 | −1.017 | 15.431 | 6.760 |
| ATOM | 631 | CE | MET | A | 16 | −0.799 | 14.823 | 8.475 |
| ATOM | 632 | N | LEU | A | 17 | 0.238 | 10.231 | 4.426 |
| ATOM | 633 | CA | LEU | A | 17 | 1.077 | 9.065 | 4.508 |
| ATOM | 634 | C | LEU | A | 17 | 2.289 | 9.610 | 5.264 |
| ATOM | 635 | O | LEU | A | 17 | 2.939 | 10.565 | 4.818 |
| ATOM | 636 | CB | LEU | A | 17 | 1.461 | 8.608 | 3.100 |
| ATOM | 637 | CG | LEU | A | 17 | 2.324 | 7.355 | 2.955 |
| ATOM | 638 | CD1 | LEU | A | 17 | 1.553 | 6.145 | 3.445 |
| ATOM | 639 | CD2 | LEU | A | 17 | 2.723 | 7.190 | 1.492 |
| ATOM | 640 | N | TYR | A | 18 | 2.581 | 9.029 | 6.418 |
| ATOM | 641 | CA | TYR | A | 18 | 3.706 | 9.501 | 7.196 |
| ATOM | 642 | C | TYR | A | 18 | 4.434 | 8.333 | 7.835 |
| ATOM | 643 | O | TYR | A | 18 | 4.081 | 7.186 | 7.603 |
| ATOM | 644 | CB | TYR | A | 18 | 3.222 | 10.458 | 8.281 |
| ATOM | 645 | CG | TYR | A | 18 | 2.386 | 9.782 | 9.346 |
| ATOM | 646 | CD1 | TYR | A | 18 | 1.029 | 9.527 | 9.147 |
| ATOM | 647 | CD2 | TYR | A | 18 | 2.961 | 9.379 | 10.550 |
| ATOM | 648 | CE1 | TYR | A | 18 | 0.273 | 8.894 | 10.128 |
| ATOM | 649 | CE2 | TYR | A | 18 | 2.218 | 8.745 | 11.526 |
| ATOM | 650 | CZ | TYR | A | 18 | 0.877 | 8.508 | 11.317 |
| ATOM | 651 | OH | TYR | A | 18 | 0.134 | 7.922 | 12.318 |
| ATOM | 652 | N | LEU | A | 19 | 5.439 | 8.651 | 8.650 |
| ATOM | 653 | CA | LEU | A | 19 | 6.255 | 7.661 | 9.347 |
| ATOM | 654 | C | LEU | A | 19 | 6.210 | 7.946 | 10.847 |
| ATOM | 655 | O | LEU | A | 19 | 6.685 | 8.992 | 11.288 |
| ATOM | 656 | CB | LEU | A | 19 | 7.701 | 7.763 | 8.871 |
| ATOM | 657 | CG | LEU | A | 19 | 7.901 | 7.850 | 7.359 |
| ATOM | 658 | CD1 | LEU | A | 19 | 9.300 | 8.379 | 7.039 |
| ATOM | 659 | CD2 | LEU | A | 19 | 7.669 | 6.482 | 6.748 |

116. A method of inducing cell differentiation, tissue regeneration, or tissue formation comprising:
administering an effective amount of a functionalized biomaterial to a mesenchymal stem cell or progenitor cell at any stage of differentiation thereof,
wherein said method is selected from the group consisting of a pharmaceutical method, a surgical method, a dermatological method, a prophylactic method, an imaging method and any combination thereof,
wherein the administration is in vitro, ex vivo or in vivo, and
wherein the functionalized biomaterial comprises at least one peptide and at least one biomaterial-affinity-containing group, wherein said at least one biomaterial-affinity-containing group provides said peptide with the ability to covalently or non-covalently interact with a biomaterial, and
a biomaterial, and
wherein said at least one peptide is up to 30 amino acids in length and comprises a peptide with four amino acids, PEP1;
wherein PEP1 is selected from the group consisting of SAIS, NAIS and SPIS;
wherein the RMSD value of the structure coordinates of said peptide or peptidomimetic with respect to PEPREF is 2.45 Å (Angstroms) or less;
and wherein PEPREF is

| | | | | | | | | |
|---|---|---|---|---|---|---|---|---|
| ATOM | 511 | N | LYS | A | 1 | −14.570 | 46.437 | 27.424 |
| ATOM | 512 | CA | LYS | A | 1 | −13.512 | 45.748 | 28.151 |
| ATOM | 513 | C | LYS | A | 1 | −13.655 | 44.259 | 27.884 |
| ATOM | 514 | O | LYS | A | 1 | −12.769 | 43.463 | 28.197 |
| ATOM | 515 | CB | LYS | A | 1 | −13.605 | 46.029 | 29.652 |
| ATOM | 516 | CG | LYS | A | 1 | −13.640 | 47.509 | 29.991 |
| ATOM | 517 | CD | LYS | A | 1 | −12.615 | 48.297 | 29.183 |
| ATOM | 518 | CE | LYS | A | 1 | −12.625 | 49.768 | 29.575 |
| ATOM | 519 | NZ | LYS | A | 1 | −13.994 | 50.369 | 29.497 |
| ATOM | 520 | N | ILE | A | 2 | −14.792 | 43.890 | 27.309 |
| ATOM | 521 | CA | ILE | A | 2 | −15.051 | 42.499 | 26.967 |
| ATOM | 522 | C | ILE | A | 2 | −14.911 | 42.370 | 25.444 |
| ATOM | 523 | O | ILE | A | 2 | −15.531 | 43.125 | 24.683 |
| ATOM | 524 | CB | ILE | A | 2 | −16.466 | 42.065 | 27.401 |
| ATOM | 525 | CG1 | ILE | A | 2 | −16.630 | 42.238 | 28.915 |
| ATOM | 526 | CG2 | ILE | A | 2 | −16.710 | 40.629 | 26.985 |
| ATOM | 527 | CD1 | ILE | A | 2 | −15.631 | 41.478 | 29.30 |
| ATOM | 528 | N | PRO | A | 3 | −14.085 | 41.411 | 24.989 |
| ATOM | 529 | CA | PRO | A | 3 | −13.789 | 41.109 | 23.588 |
| ATOM | 530 | C | PRO | A | 3 | −14.998 | 40.695 | 22.768 |
| ATOM | 531 | O | PRO | A | 3 | −15.969 | 40.164 | 23.305 |
| ATOM | 532 | CB | PRO | A | 3 | −12.785 | 39.968 | 23.688 |
| ATOM | 533 | CG | PRO | A | 3 | −12.156 | 40.166 | 25.007 |
| ATOM | 534 | CD | PRO | A | 3 | −13.330 | 40.506 | 25.867 |
| ATOM | 535 | N | LYS | A | 4 | −14.937 | 40.937 | 21.463 |
| ATOM | 536 | CA | LYS | A | 4 | −16.023 | 40.529 | 20.590 |
| ATOM | 537 | C | LYS | A | 4 | −15.886 | 39.015 | 20.391 |
| ATOM | 538 | O | LYS | A | 4 | −14.903 | 38.415 | 20.831 |
| ATOM | 539 | CB | LYS | A | 4 | −15.926 | 41.244 | 19.245 |
| ATOM | 540 | CG | LYS | A | 4 | −15.802 | 42.751 | 19.355 |
| ATOM | 541 | CD | LYS | A | 4 | −16.292 | 43.433 | 18.083 |
| ATOM | 542 | CE | LYS | A | 4 | −16.162 | 44.943 | 18.177 |
| ATOM | 543 | NZ | LYS | A | 4 | −16.825 | 45.628 | 17.019 |
| ATOM | 544 | N | ALA | A | 5 | −16.85 | 38.393 | 19.759 |
| ATOM | 545 | CA | ALA | A | 5 | −16.811 | 36.955 | 19.507 |
| ATOM | 546 | C | ALA | A | 5 | −15.772 | 36.771 | 18.416 |
| ATOM | 547 | O | ALA | A | 5 | −15.727 | 37.534 | 17.455 |
| ATOM | 548 | CB | ALA | A | 5 | −18.168 | 36.419 | 19.043 |
| ATOM | 549 | N | CYS | A | 6 | −14.935 | 35.756 | 18.562 |
| ATOM | 550 | CA | CYS | A | 6 | −13.887 | 35.518 | 17.584 |
| ATOM | 551 | C | CYS | A | 6 | −14.347 | 34.765 | 16.338 |
| ATOM | 552 | O | CYS | A | 6 | −15.327 | 34.018 | 16.368 |
| ATOM | 553 | CB | CYS | A | 6 | −12.743 | 34.768 | 18.241 |
| ATOM | 554 | SG | CYS | A | 6 | −11.198 | 34.959 | 17.353 |
| ATOM | 555 | N | CYS | A | 7 | −13.623 | 34.973 | 15.243 |
| ATOM | 556 | CA | CYS | A | 7 | −13.931 | 34.328 | 13.969 |
| ATOM | 557 | C | CYS | A | 7 | −13.091 | 33.071 | 13.798 |
| ATOM | 558 | O | CYS | A | 7 | −11.961 | 33.123 | 13.302 |
| ATOM | 559 | CB | CYS | A | 7 | −13.653 | 35.290 | 12.824 |
| ATOM | 560 | SG | CYS | A | 7 | −13.930 | 34.633 | 11.154 |
| ATOM | 561 | N | VAL | A | 8 | −13.654 | 31.941 | 14.209 |
| ATOM | 562 | CA | VAL | A | 8 | −12.949 | 30.684 | 14.110 |
| ATOM | 563 | C | VAL | A | 8 | −13.653 | 29.733 | 13.157 |
| ATOM | 564 | O | VAL | A | 8 | −14.759 | 30.016 | 12.687 |
| ATOM | 565 | CB | VAL | A | 8 | −12.814 | 30.038 | 15.492 |
| ATOM | 566 | CG1 | VAL | A | 8 | −11.807 | 30.825 | 16.337 |
| ATOM | 567 | CG2 | VAL | A | 8 | −14.161 | 30.006 | 16.170 |
| ATOM | 568 | N | PRO | A | 9 | −13.003 | 28.601 | 12.828 |
| ATOM | 569 | CA | PRO | A | 9 | −13.593 | 27.615 | 11.918 |
| ATOM | 570 | C | PRO | A | 9 | −14.726 | 26.886 | 12.631 |
| ATOM | 571 | O | PRO | A | 9 | −14.581 | 26.476 | 13.780 |
| ATOM | 572 | CB | PRO | A | 9 | −12.423 | 26.676 | 11.601 |
| ATOM | 573 | CG | PRO | A | 9 | −11.204 | 27.487 | 11.925 |
| ATOM | 574 | CD | PRO | A | 9 | −11.620 | 28.226 | 13.163 |
| ATOM | 575 | N | THR | A | 10 | −15.847 | 26.721 | 11.942 |
| ATOM | 576 | CA | THR | A | 10 | −16.999 | 26.060 | 12.527 |
| ATOM | 577 | C | THR | A | 10 | −17.334 | 24.767 | 11.804 |
| ATOM | 578 | O | THR | A | 10 | −18.097 | 23.943 | 12.303 |
| ATOM | 579 | CB | THR | A | 10 | −18.211 | 27.010 | 12.523 |
| ATOM | 580 | OG1 | THR | A | 10 | −18.491 | 27.445 | 11.185 |
| ATOM | 581 | CG2 | THR | A | 10 | −17.902 | 28.230 | 13.375 |
| ATOM | 582 | N | GLU | A | 11 | −16.750 | 24.586 | 10.627 |
| ATOM | 583 | CA | GLU | A | 11 | −16.980 | 23.377 | 9.848 |
| ATOM | 584 | C | GLU | A | 11 | −15.643 | 22.935 | 9.246 |
| ATOM | 585 | O | GLU | A | 11 | −15.029 | 23.666 | 8.464 |
| ATOM | 586 | CB | GLU | A | 11 | −17.981 | 23.624 | 8.715 |
| ATOM | 587 | CG | GLU | A | 11 | −19.421 | 23.807 | 9.163 |
| ATOM | 588 | CD | GLU | A | 11 | −19.686 | 25.166 | 9.770 |
| ATOM | 589 | OE1 | GLU | A | 11 | −19.478 | 26.175 | 9.073 |
| ATOM | 590 | OE2 | GLU | A | 11 | −20.111 | 25.227 | 10.939 |
| ATOM | 591 | N | LEU | A | 12 | −15.183 | 21.749 | 9.622 |
| ATOM | 592 | CA | LEU | A | 12 | −13.923 | 21.254 | 9.104 |
| ATOM | 593 | C | LEU | A | 12 | −14.062 | 19.912 | 8.386 |
| ATOM | 594 | O | LEU | A | 12 | −15.136 | 19.299 | 8.359 |
| ATOM | 595 | CB | LEU | A | 12 | −12.893 | 21.144 | 10.230 |
| ATOM | 596 | CG | LEU | A | 12 | −12.660 | 22.422 | 11.054 |
| ATOM | 597 | CD1 | LEU | A | 12 | −13.475 | 22.350 | 12.337 |
| ATOM | 598 | CD2 | LEU | A | 12 | −11.181 | 22.586 | 11.399 |
| ATOM | 599 | N | SER | A | 13 | −12.971 | 19.476 | 7.771 |
| ATOM | 600 | CA | SER | A | 13 | −12.964 | 18.218 | 7.046 |
| ATOM | 601 | C | SER | A | 13 | −11.568 | 17.628 | 7.164 |
| ATOM | 602 | O | SER | A | 13 | −10.613 | 18.320 | 7.550 |
| ATOM | 603 | CB | SER | A | 13 | −13.346 | 18.435 | 5.578 |
| ATOM | 604 | OG | SER | A | 13 | −12.404 | 19.261 | 4.923 |
| ATOM | 605 | N | ALA | A | 13 | −11.449 | 16.352 | 6.818 |
| ATOM | 606 | CA | ALA | A | 13 | −10.179 | 15.665 | 6.949 |
| ATOM | 607 | C | ALA | A | 13 | −9.421 | 15.471 | 5.652 |
| ATOM | 608 | O | ALA | A | 13 | −9.941 | 15.720 | 4.563 |
| ATOM | 609 | CB | ALA | A | 13 | −10.413 | 14.306 | 7.626 |
| ATOM | 610 | N | ILE | A | 14 | −8.171 | 15.046 | 5.783 |
| ATOM | 611 | CA | ILE | A | 14 | −7.343 | 14.746 | 4.623 |
| ATOM | 612 | C | ILE | A | 14 | −6.475 | 13.559 | 5.004 |
| ATOM | 613 | O | ILE | A | 14 | −6.212 | 13.316 | 6.183 |
| ATOM | 614 | CB | ILE | A | 14 | −6.401 | 15.916 | 4.183 |
| ATOM | 615 | CG1 | ILE | A | 14 | −5.284 | 16.106 | 5.200 |
| ATOM | 616 | CG2 | ILE | A | 14 | −7.188 | 17.211 | 3.982 |
| ATOM | 617 | CD1 | ILE | A | 14 | −4.173 | 16.973 | 4.696 |
| ATOM | 618 | N | SER | A | 15 | −6.045 | 12.806 | 3.999 |
| ATOM | 619 | CA | SER | A | 15 | −5.187 | 11.662 | 4.242 |
| ATOM | 620 | C | SER | A | 15 | −3.740 | 12.089 | 4.217 |
| ATOM | 621 | O | SER | A | 15 | −3.360 | 13.020 | 3.508 |
| ATOM | 622 | CB | SER | A | 15 | −5.416 | 10.584 | 3.185 |
| ATOM | 623 | OG | SER | A | 15 | −6.667 | 9.971 | 3.401 |
| ATOM | 624 | N | MET | A | 16 | −2.933 | 11.409 | 5.012 |
| ATOM | 625 | CA | MET | A | 16 | −1.518 | 11.700 | 5.047 |
| ATOM | 626 | C | MET | A | 16 | −0.778 | 10.414 | 5.244 |
| ATOM | 627 | O | MET | A | 16 | −1.137 | 9.594 | 6.078 |
| ATOM | 628 | CB | MET | A | 16 | −1.170 | 12.694 | 6.164 |
| ATOM | 629 | CG | MET | A | 16 | −1.848 | 14.042 | 5.974 |
| ATOM | 630 | SD | MET | A | 16 | −1.017 | 15.431 | 6.760 |
| ATOM | 631 | CE | MET | A | 16 | −0.799 | 14.823 | 8.475 |
| ATOM | 632 | N | LEU | A | 17 | 0.238 | 10.231 | 4.426 |
| ATOM | 633 | CA | LEU | A | 17 | 1.077 | 9.065 | 4.508 |
| ATOM | 634 | C | LEU | A | 17 | 2.289 | 9.610 | 5.264 |
| ATOM | 635 | O | LEU | A | 17 | 2.939 | 10.565 | 4.818 |
| ATOM | 636 | CB | LEU | A | 17 | 1.461 | 8.608 | 3.100 |
| ATOM | 637 | CG | LEU | A | 17 | 2.324 | 7.355 | 2.955 |
| ATOM | 638 | CD1 | LEU | A | 17 | 1.553 | 6.145 | 3.445 |
| ATOM | 639 | CD2 | LEU | A | 17 | 2.723 | 7.190 | 1.492 |
| ATOM | 640 | N | TYR | A | 18 | 2.581 | 9.029 | 6.418 |
| ATOM | 641 | CA | TYR | A | 18 | 3.706 | 9.501 | 7.196 |
| ATOM | 642 | C | TYR | A | 18 | 4.434 | 8.333 | 7.835 |
| ATOM | 643 | O | TYR | A | 18 | 4.081 | 7.186 | 7.603 |
| ATOM | 644 | CB | TYR | A | 18 | 3.222 | 10.458 | 8.281 |
| ATOM | 645 | CG | TYR | A | 18 | 2.386 | 9.782 | 9.346 |
| ATOM | 646 | CD1 | TYR | A | 18 | 1.029 | 9.527 | 9.147 |
| ATOM | 647 | CD2 | TYR | A | 18 | 2.961 | 9.379 | 10.550 |
| ATOM | 648 | CE1 | TYR | A | 18 | 0.273 | 8.894 | 10.128 |
| ATOM | 649 | CE2 | TYR | A | 18 | 2.218 | 8.745 | 11.526 |
| ATOM | 650 | CZ | TYR | A | 18 | 0.877 | 8.508 | 11.317 |
| ATOM | 651 | OH | TYR | A | 18 | 0.134 | 7.922 | 12.318 |
| ATOM | 652 | N | LEU | A | 19 | 5.439 | 8.651 | 8.650 |
| ATOM | 653 | CA | LEU | A | 19 | 6.255 | 7.661 | 9.347 |
| ATOM | 654 | C | LEU | A | 19 | 6.210 | 7.946 | 10.847 |
| ATOM | 655 | O | LEU | A | 19 | 6.685 | 8.992 | 11.288 |
| ATOM | 656 | CB | LEU | A | 19 | 7.701 | 7.763 | 8.871 |
| ATOM | 657 | CG | LEU | A | 19 | 7.901 | 7.850 | 7.359 |
| ATOM | 658 | CD1 | LEU | A | 19 | 9.300 | 8.379 | 7.039 |
| ATOM | 659 | CD2 | LEU | A | 19 | 7.669 | 6.482 | 6.748 |

117. The method according to claim 116, wherein said method further comprises preventing, or treating a disease, condition, disorder, or pathology, or enhancing, promoting or inducing a medical application in a patient, wherein said disease, condition, disorder, pathology or medical application is selected from the group consisting of:
enhancing osteogenesis, inducing bone formation, inducing osteocyte maturation, or treating, or preventing osteoporosis,
enhancing chondrogenesis, inducing cartilage formation, inducing chondrocyte maturation, treating or preventing osteoarthritis, treating or preventing costochondritis, treating or preventing herniation, treating or preventing achondroplasia, treating, or preventing relapsing polychondritis;
enhancing axonal dendritic neuron growth, promoting neuron-regeneration, treating, or preventing neuron degeneration-related conditions and diseases;
enhancing fibrous tissue formation, promoting tendon and ligament regeneration, preventing, or treating tendon/ligament cell degeneration;
promoting female fertility, or treating or preventing, female infertility;
treating asthma, Chronic obstructive pulmonary disease, Chronic bronchitis, Emphysema, Cystic fibrosis, Pulmonary edema, Acute respiratory distress syndrome, Pneumoconiosis, Interstitial lung disease, Sarcoidosis, Idiopathic pulmonary fibrosis, Pulmonary embolism, Pulmonary hypertension, Pleural effusion, Pneumothorax, Mesothelioma, Granulomatosis with polyangiitis, Goodpasture syndrome, Pulmonary hyperplasia, Infant respiratory distress syndrome, Chronic obstructive pulmonary disease, Silicosis, Sleep Apnea, Severe Acute Respiratory Syndrome, Pulmonary fibrosis, Primary ciliary dyskinesia, Pneumoconiosis, Hypersensitivity Pneumonitis, Cryptogenic Organizing Pneumonia (Bronchiolitis Obliterans Organizing Pneumonia, Byssinosis, Bronchopulmonary Dysplasia, Bronchiolitis, Bronchiectasis, Asbestosis, Pertussis, Middle Eastern Respiratory Syndrome, Pneumonia, Tuberculosis, Bronchitis, Histoplasmosis, Coccidioidomycosis, and Acute bronchitis;
treating obesity, Dercum's disease, Multiple symmetric lipomatosis, Familial multiple lipomatosis, Lipodystrophy, Lipedema, and Atherosclerosis.

118. A surgical method for surgical treatment comprising:
contacting a body part of a patient to be treated with a peptide, wherein said contacting induces stem cell differentiation and tissue formation, and
wherein the peptide is up to 30 amino acids in length and comprises a peptide with four amino acids, PEP1;
wherein PEP1 is selected from the group consisting of SAIS, NAIS and SPIS;
wherein the RMSD value of the structure coordinates of said peptide or peptidomimetic with respect to PEPREF is 2.45 Å (Angstroms) or less;
and wherein PEPREF is

| | | | | | | | | |
|---|---|---|---|---|---|---|---|---|
| ATOM | 511 | N | LYS | A | 1 | −14.570 | 46.437 | 27.424 |
| ATOM | 512 | CA | LYS | A | 1 | −13.512 | 45.748 | 28.151 |
| ATOM | 513 | C | LYS | A | 1 | −13.655 | 44.259 | 27.884 |
| ATOM | 514 | O | LYS | A | 1 | −12.769 | 43.463 | 28.197 |
| ATOM | 515 | CB | LYS | A | 1 | −13.605 | 46.029 | 29.652 |
| ATOM | 516 | CG | LYS | A | 1 | −13.640 | 47.509 | 29.991 |
| ATOM | 517 | CD | LYS | A | 1 | −12.615 | 48.297 | 29.183 |
| ATOM | 518 | CE | LYS | A | 1 | −12.625 | 49.768 | 29.575 |
| ATOM | 519 | NZ | LYS | A | 1 | −13.994 | 50.369 | 29.497 |
| ATOM | 520 | N | ILE | A | 2 | −14.792 | 43.890 | 27.309 |
| ATOM | 521 | CA | ILE | A | 2 | −15.051 | 42.499 | 26.967 |
| ATOM | 522 | C | ILE | A | 2 | −14.911 | 42.370 | 25.444 |
| ATOM | 523 | O | ILE | A | 2 | −15.531 | 43.125 | 24.683 |
| ATOM | 524 | CB | ILE | A | 2 | −16.466 | 42.065 | 27.401 |
| ATOM | 525 | CG1 | ILE | A | 2 | −16.630 | 42.238 | 28.915 |
| ATOM | 526 | CG2 | ILE | A | 2 | −16.710 | 40.629 | 26.985 |
| ATOM | 527 | CD1 | ILE | A | 2 | −15.631 | 41.478 | 29.30 |
| ATOM | 528 | N | PRO | A | 3 | −14.085 | 41.411 | 24.989 |
| ATOM | 529 | CA | PRO | A | 3 | −13.789 | 41.109 | 23.588 |
| ATOM | 530 | C | PRO | A | 3 | −14.998 | 40.695 | 22.768 |
| ATOM | 531 | O | PRO | A | 3 | −15.969 | 40.164 | 23.305 |
| ATOM | 532 | CB | PRO | A | 3 | −12.785 | 39.968 | 23.688 |
| ATOM | 533 | CG | PRO | A | 3 | −12.156 | 40.166 | 25.007 |
| ATOM | 534 | CD | PRO | A | 3 | −13.330 | 40.506 | 25.867 |
| ATOM | 535 | N | LYS | A | 4 | −14.937 | 40.937 | 21.463 |
| ATOM | 536 | CA | LYS | A | 4 | −16.023 | 40.529 | 20.590 |
| ATOM | 537 | C | LYS | A | 4 | −15.886 | 39.015 | 20.391 |
| ATOM | 538 | O | LYS | A | 4 | −14.903 | 38.415 | 20.831 |
| ATOM | 539 | CB | LYS | A | 4 | −15.926 | 41.244 | 19.245 |
| ATOM | 540 | CG | LYS | A | 4 | −15.802 | 42.751 | 19.355 |
| ATOM | 541 | CD | LYS | A | 4 | −16.292 | 43.433 | 18.083 |
| ATOM | 542 | CE | LYS | A | 4 | −16.162 | 44.943 | 18.177 |
| ATOM | 543 | NZ | LYS | A | 4 | −16.825 | 45.628 | 17.019 |
| ATOM | 544 | N | ALA | A | 5 | −16.85 | 38.393 | 19.759 |
| ATOM | 545 | CA | ALA | A | 5 | −16.811 | 36.955 | 19.507 |
| ATOM | 546 | C | ALA | A | 5 | −15.772 | 36.771 | 18.416 |
| ATOM | 547 | O | ALA | A | 5 | −15.727 | 37.534 | 17.455 |
| ATOM | 548 | CB | ALA | A | 5 | −18.168 | 36.419 | 19.043 |
| ATOM | 549 | N | CYS | A | 6 | −14.935 | 35.756 | 18.562 |
| ATOM | 550 | CA | CYS | A | 6 | −13.887 | 35.518 | 17.584 |
| ATOM | 551 | C | CYS | A | 6 | −14.347 | 34.765 | 16.338 |
| ATOM | 552 | O | CYS | A | 6 | −15.327 | 34.018 | 16.368 |
| ATOM | 553 | CB | CYS | A | 6 | −12.743 | 34.768 | 18.241 |
| ATOM | 554 | SG | CYS | A | 6 | −11.198 | 34.959 | 17.353 |
| ATOM | 555 | N | CYS | A | 7 | −13.623 | 34.973 | 15.243 |
| ATOM | 556 | CA | CYS | A | 7 | −13.931 | 34.328 | 13.969 |
| ATOM | 557 | C | CYS | A | 7 | −13.091 | 33.071 | 13.798 |
| ATOM | 558 | O | CYS | A | 7 | −11.961 | 33.123 | 13.302 |
| ATOM | 559 | CB | CYS | A | 7 | −13.653 | 35.290 | 12.824 |
| ATOM | 560 | SG | CYS | A | 7 | −13.930 | 34.633 | 11.154 |
| ATOM | 561 | N | VAL | A | 8 | −13.654 | 31.941 | 14.209 |
| ATOM | 562 | CA | VAL | A | 8 | −12.949 | 30.684 | 14.110 |
| ATOM | 563 | C | VAL | A | 8 | −13.653 | 29.733 | 13.157 |
| ATOM | 564 | O | VAL | A | 8 | −14.759 | 30.016 | 12.687 |
| ATOM | 565 | CB | VAL | A | 8 | −12.814 | 30.038 | 15.492 |
| ATOM | 566 | CG1 | VAL | A | 8 | −11.807 | 30.825 | 16.337 |
| ATOM | 567 | CG2 | VAL | A | 8 | −14.161 | 30.006 | 16.170 |
| ATOM | 568 | N | PRO | A | 9 | −13.003 | 28.601 | 12.828 |
| ATOM | 569 | CA | PRO | A | 9 | −13.593 | 27.615 | 11.918 |
| ATOM | 570 | C | PRO | A | 9 | −14.726 | 26.886 | 12.631 |
| ATOM | 571 | O | PRO | A | 9 | −14.581 | 26.476 | 13.780 |
| ATOM | 572 | CB | PRO | A | 9 | −12.423 | 26.676 | 11.601 |
| ATOM | 573 | CG | PRO | A | 9 | −11.204 | 27.487 | 11.925 |
| ATOM | 574 | CD | PRO | A | 9 | −11.620 | 28.226 | 13.163 |
| ATOM | 575 | N | THR | A | 10 | −15.847 | 26.721 | 11.942 |
| ATOM | 576 | CA | THR | A | 10 | −16.999 | 26.060 | 12.527 |
| ATOM | 577 | C | THR | A | 10 | −17.334 | 24.767 | 11.804 |
| ATOM | 578 | O | THR | A | 10 | −18.097 | 23.943 | 12.303 |
| ATOM | 579 | CB | THR | A | 10 | −18.211 | 27.010 | 12.523 |
| ATOM | 580 | OG1 | THR | A | 10 | −18.491 | 27.445 | 11.185 |
| ATOM | 581 | CG2 | THR | A | 10 | −17.902 | 28.230 | 13.375 |
| ATOM | 582 | N | GLU | A | 11 | −16.750 | 24.586 | 10.627 |
| ATOM | 583 | CA | GLU | A | 11 | −16.980 | 23.377 | 9.848 |
| ATOM | 584 | C | GLU | A | 11 | −15.643 | 22.935 | 9.246 |
| ATOM | 585 | O | GLU | A | 11 | −15.029 | 23.666 | 8.464 |
| ATOM | 586 | CB | GLU | A | 11 | −17.981 | 23.624 | 8.715 |
| ATOM | 587 | CG | GLU | A | 11 | −19.421 | 23.807 | 9.163 |
| ATOM | 588 | CD | GLU | A | 11 | −19.686 | 25.166 | 9.770 |
| ATOM | 589 | OE1 | GLU | A | 11 | −19.478 | 26.175 | 9.073 |
| ATOM | 590 | OE2 | GLU | A | 11 | −20.111 | 25.227 | 10.939 |
| ATOM | 591 | N | LEU | A | 12 | −15.183 | 21.749 | 9.622 |
| ATOM | 592 | CA | LEU | A | 12 | −13.923 | 21.254 | 9.104 |
| ATOM | 593 | C | LEU | A | 12 | −14.062 | 19.912 | 8.386 |
| ATOM | 594 | O | LEU | A | 12 | −15.136 | 19.299 | 8.359 |
| ATOM | 595 | CB | LEU | A | 12 | −12.893 | 21.144 | 10.230 |
| ATOM | 596 | CG | LEU | A | 12 | −12.660 | 22.422 | 11.054 |
| ATOM | 597 | CD1 | LEU | A | 12 | −13.475 | 22.350 | 12.337 |
| ATOM | 598 | CD2 | LEU | A | 12 | −11.181 | 22.586 | 11.399 |
| ATOM | 599 | N | SER | A | 13 | −12.971 | 19.476 | 7.771 |
| ATOM | 600 | CA | SER | A | 13 | −12.964 | 18.218 | 7.046 |
| ATOM | 601 | C | SER | A | 13 | −11.568 | 17.628 | 7.164 |
| ATOM | 602 | O | SER | A | 13 | −10.613 | 18.320 | 7.550 |
| ATOM | 603 | CB | SER | A | 13 | −13.346 | 18.435 | 5.578 |
| ATOM | 604 | OG | SER | A | 13 | −12.404 | 19.261 | 4.923 |
| ATOM | 605 | N | ALA | A | 13 | −11.449 | 16.352 | 6.818 |
| ATOM | 606 | CA | ALA | A | 13 | −10.179 | 15.665 | 6.949 |
| ATOM | 607 | C | ALA | A | 13 | −9.421 | 15.471 | 5.652 |
| ATOM | 608 | O | ALA | A | 13 | −9.941 | 15.720 | 4.563 |
| ATOM | 609 | CB | ALA | A | 13 | −10.413 | 14.306 | 7.626 |
| ATOM | 610 | N | ILE | A | 14 | −8.171 | 15.046 | 5.783 |
| ATOM | 611 | CA | ILE | A | 14 | −7.343 | 14.746 | 4.623 |
| ATOM | 612 | C | ILE | A | 14 | −6.475 | 13.559 | 5.004 |
| ATOM | 613 | O | ILE | A | 14 | −6.212 | 13.316 | 6.183 |
| ATOM | 614 | CB | ILE | A | 14 | −6.401 | 15.916 | 4.183 |
| ATOM | 615 | CG1 | ILE | A | 14 | −5.284 | 16.106 | 5.200 |
| ATOM | 616 | CG2 | ILE | A | 14 | −7.188 | 17.211 | 3.982 |
| ATOM | 617 | CD1 | ILE | A | 14 | −4.173 | 16.973 | 4.696 |
| ATOM | 618 | N | SER | A | 15 | −6.045 | 12.806 | 3.999 |
| ATOM | 619 | CA | SER | A | 15 | −5.187 | 11.662 | 4.242 |
| ATOM | 620 | C | SER | A | 15 | −3.740 | 12.089 | 4.217 |
| ATOM | 621 | O | SER | A | 15 | −3.360 | 13.020 | 3.508 |
| ATOM | 622 | CB | SER | A | 15 | −5.416 | 10.584 | 3.185 |
| ATOM | 623 | OG | SER | A | 15 | −6.667 | 9.971 | 3.401 |
| ATOM | 624 | N | MET | A | 16 | −2.933 | 11.409 | 5.012 |
| ATOM | 625 | CA | MET | A | 16 | −1.518 | 11.700 | 5.047 |
| ATOM | 626 | C | MET | A | 16 | −0.778 | 10.414 | 5.244 |
| ATOM | 627 | O | MET | A | 16 | −1.137 | 9.594 | 6.078 |
| ATOM | 628 | CB | MET | A | 16 | −1.170 | 12.694 | 6.164 |
| ATOM | 629 | CG | MET | A | 16 | −1.848 | 14.042 | 5.974 |
| ATOM | 630 | SD | MET | A | 16 | −1.017 | 15.431 | 6.760 |
| ATOM | 631 | CE | MET | A | 16 | −0.799 | 14.823 | 8.475 |
| ATOM | 632 | N | LEU | A | 17 | 0.238 | 10.231 | 4.426 |
| ATOM | 633 | CA | LEU | A | 17 | 1.077 | 9.065 | 4.508 |
| ATOM | 634 | C | LEU | A | 17 | 2.289 | 9.610 | 5.264 |
| ATOM | 635 | O | LEU | A | 17 | 2.939 | 10.565 | 4.818 |
| ATOM | 636 | CB | LEU | A | 17 | 1.461 | 8.608 | 3.100 |
| ATOM | 637 | CG | LEU | A | 17 | 2.324 | 7.355 | 2.955 |
| ATOM | 638 | CD1 | LEU | A | 17 | 1.553 | 6.145 | 3.445 |
| ATOM | 639 | CD2 | LEU | A | 17 | 2.723 | 7.190 | 1.492 |
| ATOM | 640 | N | TYR | A | 18 | 2.581 | 9.029 | 6.418 |
| ATOM | 641 | CA | TYR | A | 18 | 3.706 | 9.501 | 7.196 |
| ATOM | 642 | C | TYR | A | 18 | 4.434 | 8.333 | 7.835 |
| ATOM | 643 | O | TYR | A | 18 | 4.081 | 7.186 | 7.603 |
| ATOM | 644 | CB | TYR | A | 18 | 3.222 | 10.458 | 8.281 |
| ATOM | 645 | CG | TYR | A | 18 | 2.386 | 9.782 | 9.346 |
| ATOM | 646 | CD1 | TYR | A | 18 | 1.029 | 9.527 | 9.147 |
| ATOM | 647 | CD2 | TYR | A | 18 | 2.961 | 9.379 | 10.550 |
| ATOM | 648 | CE1 | TYR | A | 18 | 0.273 | 8.894 | 10.128 |
| ATOM | 649 | CE2 | TYR | A | 18 | 2.218 | 8.745 | 11.526 |
| ATOM | 650 | CZ | TYR | A | 18 | 0.877 | 8.508 | 11.317 |
| ATOM | 651 | OH | TYR | A | 18 | 0.134 | 7.922 | 12.318 |
| ATOM | 652 | N | LEU | A | 19 | 5.439 | 8.651 | 8.650 |
| ATOM | 653 | CA | LEU | A | 19 | 6.255 | 7.661 | 9.347 |
| ATOM | 654 | C | LEU | A | 19 | 6.210 | 7.946 | 10.847 |
| ATOM | 655 | O | LEU | A | 19 | 6.685 | 8.992 | 11.288 |
| ATOM | 656 | CB | LEU | A | 19 | 7.701 | 7.763 | 8.871 |
| ATOM | 657 | CG | LEU | A | 19 | 7.901 | 7.850 | 7.359 |
| ATOM | 658 | CD1 | LEU | A | 19 | 9.300 | 8.379 | 7.039 |
| ATOM | 659 | CD2 | LEU | A | 19 | 7.669 | 6.482 | 6.748 |

119. A surgical method for surgical treatment comprising:
contacting a body part of a patient to be treated with a functionalized biomaterial, wherein said contacting induces stem cell differentiation and tissue formation, and wherein the functionalized biomaterial comprises at least one peptide and at least one biomaterial-affinity-containing group, wherein said at least one biomaterial-affinity-containing group provides said peptide with the ability to covalently or non-covalently interact with a biomaterial, and
a biomaterial, and
wherein said at least one peptide is up to 30 amino acids in length and comprises a peptide with four amino acids, PEP1;
wherein PEP1 is selected from the group consisting of SAIS, NAIS, and SPIS;
wherein the RMSD value of the structure coordinates of said peptide or peptidomimetic with respect to PEPREF is 2.45 Å (Angstroms) or less;
and wherein PEPREF is

| | | | | | | | | |
|---|---|---|---|---|---|---|---|---|
| ATOM | 511 | N | LYS | A | 1 | −14.570 | 46.437 | 27.424 |
| ATOM | 512 | CA | LYS | A | 1 | −13.512 | 45.748 | 28.151 |
| ATOM | 513 | C | LYS | A | 1 | −13.655 | 44.259 | 27.884 |
| ATOM | 514 | O | LYS | A | 1 | −12.769 | 43.463 | 28.197 |
| ATOM | 515 | CB | LYS | A | 1 | −13.605 | 46.029 | 29.652 |
| ATOM | 516 | CG | LYS | A | 1 | −13.640 | 47.509 | 29.991 |
| ATOM | 517 | CD | LYS | A | 1 | −12.615 | 48.297 | 29.183 |
| ATOM | 518 | CE | LYS | A | 1 | −12.625 | 49.768 | 29.575 |
| ATOM | 519 | NZ | LYS | A | 1 | −13.994 | 50.369 | 29.497 |
| ATOM | 520 | N | ILE | A | 2 | −14.792 | 43.890 | 27.309 |
| ATOM | 521 | CA | ILE | A | 2 | −15.051 | 42.499 | 26.967 |
| ATOM | 522 | C | ILE | A | 2 | −14.911 | 42.370 | 25.444 |
| ATOM | 523 | O | ILE | A | 2 | −15.531 | 43.125 | 24.683 |
| ATOM | 524 | CB | ILE | A | 2 | −16.466 | 42.065 | 27.401 |
| ATOM | 525 | CG1 | ILE | A | 2 | −16.630 | 42.238 | 28.915 |
| ATOM | 526 | CG2 | ILE | A | 2 | −16.710 | 40.629 | 26.985 |
| ATOM | 527 | CD1 | ILE | A | 2 | −15.631 | 41.478 | 29.30 |
| ATOM | 528 | N | PRO | A | 3 | −14.085 | 41.411 | 24.989 |
| ATOM | 529 | CA | PRO | A | 3 | −13.789 | 41.109 | 23.588 |
| ATOM | 530 | C | PRO | A | 3 | −14.998 | 40.695 | 22.768 |
| ATOM | 531 | O | PRO | A | 3 | −15.969 | 40.164 | 23.305 |
| ATOM | 532 | CB | PRO | A | 3 | −12.785 | 39.968 | 23.688 |
| ATOM | 533 | CG | PRO | A | 3 | −12.156 | 40.166 | 25.007 |
| ATOM | 534 | CD | PRO | A | 3 | −13.330 | 40.506 | 25.867 |
| ATOM | 535 | N | LYS | A | 4 | −14.937 | 40.937 | 21.463 |
| ATOM | 536 | CA | LYS | A | 4 | −16.023 | 40.529 | 20.590 |
| ATOM | 537 | C | LYS | A | 4 | −15.886 | 39.015 | 20.391 |
| ATOM | 538 | O | LYS | A | 4 | −14.903 | 38.415 | 20.831 |
| ATOM | 539 | CB | LYS | A | 4 | −15.926 | 41.244 | 19.245 |
| ATOM | 540 | CG | LYS | A | 4 | −15.802 | 42.751 | 19.355 |
| ATOM | 541 | CD | LYS | A | 4 | −16.292 | 43.433 | 18.083 |
| ATOM | 542 | CE | LYS | A | 4 | −16.162 | 44.943 | 18.177 |
| ATOM | 543 | NZ | LYS | A | 4 | −16.825 | 45.628 | 17.019 |
| ATOM | 544 | N | ALA | A | 5 | −16.85 | 38.393 | 19.759 |
| ATOM | 545 | CA | ALA | A | 5 | −16.811 | 36.955 | 19.507 |
| ATOM | 546 | C | ALA | A | 5 | −15.772 | 36.771 | 18.416 |
| ATOM | 547 | O | ALA | A | 5 | −15.727 | 37.534 | 17.455 |
| ATOM | 548 | CB | ALA | A | 5 | −18.168 | 36.419 | 19.043 |
| ATOM | 549 | N | CYS | A | 6 | −14.935 | 35.756 | 18.562 |
| ATOM | 550 | CA | CYS | A | 6 | −13.887 | 35.518 | 17.584 |
| ATOM | 551 | C | CYS | A | 6 | −14.347 | 34.765 | 16.338 |
| ATOM | 552 | O | CYS | A | 6 | −15.327 | 34.018 | 16.368 |
| ATOM | 553 | CB | CYS | A | 6 | −12.743 | 34.768 | 18.241 |
| ATOM | 554 | SG | CYS | A | 6 | −11.198 | 34.959 | 17.353 |
| ATOM | 555 | N | CYS | A | 7 | −13.623 | 34.973 | 15.243 |
| ATOM | 556 | CA | CYS | A | 7 | −13.931 | 34.328 | 13.969 |
| ATOM | 557 | C | CYS | A | 7 | −13.091 | 33.071 | 13.798 |
| ATOM | 558 | O | CYS | A | 7 | −11.961 | 33.123 | 13.302 |
| ATOM | 559 | CB | CYS | A | 7 | −13.653 | 35.290 | 12.824 |
| ATOM | 560 | SG | CYS | A | 7 | −13.930 | 34.633 | 11.154 |
| ATOM | 561 | N | VAL | A | 8 | −13.654 | 31.941 | 14.209 |
| ATOM | 562 | CA | VAL | A | 8 | −12.949 | 30.684 | 14.110 |
| ATOM | 563 | C | VAL | A | 8 | −13.653 | 29.733 | 13.157 |
| ATOM | 564 | O | VAL | A | 8 | −14.759 | 30.016 | 12.687 |
| ATOM | 565 | CB | VAL | A | 8 | −12.814 | 30.038 | 15.492 |
| ATOM | 566 | CG1 | VAL | A | 8 | −11.807 | 30.825 | 16.337 |
| ATOM | 567 | CG2 | VAL | A | 8 | −14.161 | 30.006 | 16.170 |
| ATOM | 568 | N | PRO | A | 9 | −13.003 | 28.601 | 12.828 |
| ATOM | 569 | CA | PRO | A | 9 | −13.593 | 27.615 | 11.918 |
| ATOM | 570 | C | PRO | A | 9 | −14.726 | 26.886 | 12.631 |
| ATOM | 571 | O | PRO | A | 9 | −14.581 | 26.476 | 13.780 |
| ATOM | 572 | CB | PRO | A | 9 | −12.423 | 26.676 | 11.601 |
| ATOM | 573 | CG | PRO | A | 9 | −11.204 | 27.487 | 11.925 |
| ATOM | 574 | CD | PRO | A | 9 | −11.620 | 28.226 | 13.163 |
| ATOM | 575 | N | THR | A | 10 | −15.847 | 26.721 | 11.942 |
| ATOM | 576 | CA | THR | A | 10 | −16.999 | 26.060 | 12.527 |
| ATOM | 577 | C | THR | A | 10 | −17.334 | 24.767 | 11.804 |
| ATOM | 578 | O | THR | A | 10 | −18.097 | 23.943 | 12.303 |
| ATOM | 579 | CB | THR | A | 10 | −18.211 | 27.010 | 12.523 |
| ATOM | 580 | OG1 | THR | A | 10 | −18.491 | 27.445 | 11.185 |
| ATOM | 581 | CG2 | THR | A | 10 | −17.902 | 28.230 | 13.375 |
| ATOM | 582 | N | GLU | A | 11 | −16.750 | 24.586 | 10.627 |
| ATOM | 583 | CA | GLU | A | 11 | −16.980 | 23.377 | 9.848 |
| ATOM | 584 | C | GLU | A | 11 | −15.643 | 22.935 | 9.246 |
| ATOM | 585 | O | GLU | A | 11 | −15.029 | 23.666 | 8.464 |
| ATOM | 586 | CB | GLU | A | 11 | −17.981 | 23.624 | 8.715 |
| ATOM | 587 | CG | GLU | A | 11 | −19.421 | 23.807 | 9.163 |
| ATOM | 588 | CD | GLU | A | 11 | −19.686 | 25.166 | 9.770 |
| ATOM | 589 | OE1 | GLU | A | 11 | −19.478 | 26.175 | 9.073 |
| ATOM | 590 | OE2 | GLU | A | 11 | −20.111 | 25.227 | 10.939 |
| ATOM | 591 | N | LEU | A | 12 | −15.183 | 21.749 | 9.622 |
| ATOM | 592 | CA | LEU | A | 12 | −13.923 | 21.254 | 9.104 |
| ATOM | 593 | C | LEU | A | 12 | −14.062 | 19.912 | 8.386 |
| ATOM | 594 | O | LEU | A | 12 | −15.136 | 19.299 | 8.359 |
| ATOM | 595 | CB | LEU | A | 12 | −12.893 | 21.144 | 10.230 |
| ATOM | 596 | CG | LEU | A | 12 | −12.660 | 22.422 | 11.054 |
| ATOM | 597 | CD1 | LEU | A | 12 | −13.475 | 22.350 | 12.337 |
| ATOM | 598 | CD2 | LEU | A | 12 | −11.181 | 22.586 | 11.399 |
| ATOM | 599 | N | SER | A | 13 | −12.971 | 19.476 | 7.771 |
| ATOM | 600 | CA | SER | A | 13 | −12.964 | 18.218 | 7.046 |
| ATOM | 601 | C | SER | A | 13 | −11.568 | 17.628 | 7.164 |
| ATOM | 602 | O | SER | A | 13 | −10.613 | 18.320 | 7.550 |
| ATOM | 603 | CB | SER | A | 13 | −13.346 | 18.435 | 5.578 |
| ATOM | 604 | OG | SER | A | 13 | −12.404 | 19.261 | 4.923 |
| ATOM | 605 | N | ALA | A | 13 | −11.449 | 16.352 | 6.818 |
| ATOM | 606 | CA | ALA | A | 13 | −10.179 | 15.665 | 6.949 |
| ATOM | 607 | C | ALA | A | 13 | −9.421 | 15.471 | 5.652 |
| ATOM | 608 | O | ALA | A | 13 | −9.941 | 15.720 | 4.563 |
| ATOM | 609 | CB | ALA | A | 13 | −10.413 | 14.306 | 7.626 |
| ATOM | 610 | N | ILE | A | 14 | −8.171 | 15.046 | 5.783 |
| ATOM | 611 | CA | ILE | A | 14 | −7.343 | 14.746 | 4.623 |
| ATOM | 612 | C | ILE | A | 14 | −6.475 | 13.559 | 5.004 |
| ATOM | 613 | O | ILE | A | 14 | −6.212 | 13.316 | 6.183 |
| ATOM | 614 | CB | ILE | A | 14 | −6.401 | 15.916 | 4.183 |
| ATOM | 615 | CG1 | ILE | A | 14 | −5.284 | 16.106 | 5.200 |
| ATOM | 616 | CG2 | ILE | A | 14 | −7.188 | 17.211 | 3.982 |
| ATOM | 617 | CD1 | ILE | A | 14 | −4.173 | 16.973 | 4.696 |
| ATOM | 618 | N | SER | A | 15 | −6.045 | 12.806 | 3.999 |
| ATOM | 619 | CA | SER | A | 15 | −5.187 | 11.662 | 4.242 |
| ATOM | 620 | C | SER | A | 15 | −3.740 | 12.089 | 4.217 |
| ATOM | 621 | O | SER | A | 15 | −3.360 | 13.020 | 3.508 |
| ATOM | 622 | CB | SER | A | 15 | −5.416 | 10.584 | 3.185 |
| ATOM | 623 | OG | SER | A | 15 | −6.667 | 9.971 | 3.401 |
| ATOM | 624 | N | MET | A | 16 | −2.933 | 11.409 | 5.012 |
| ATOM | 625 | CA | MET | A | 16 | −1.518 | 11.700 | 5.047 |
| ATOM | 626 | C | MET | A | 16 | −0.778 | 10.414 | 5.244 |
| ATOM | 627 | O | MET | A | 16 | −1.137 | 9.594 | 6.078 |
| ATOM | 628 | CB | MET | A | 16 | −1.170 | 12.694 | 6.164 |
| ATOM | 629 | CG | MET | A | 16 | −1.848 | 14.042 | 5.974 |
| ATOM | 630 | SD | MET | A | 16 | −1.017 | 15.431 | 6.760 |
| ATOM | 631 | CE | MET | A | 16 | −0.799 | 14.823 | 8.475 |
| ATOM | 632 | N | LEU | A | 17 | 0.238 | 10.231 | 4.426 |
| ATOM | 633 | CA | LEU | A | 17 | 1.077 | 9.065 | 4.508 |
| ATOM | 634 | C | LEU | A | 17 | 2.289 | 9.610 | 5.264 |
| ATOM | 635 | O | LEU | A | 17 | 2.939 | 10.565 | 4.818 |
| ATOM | 636 | CB | LEU | A | 17 | 1.461 | 8.608 | 3.100 |
| ATOM | 637 | CG | LEU | A | 17 | 2.324 | 7.355 | 2.955 |
| ATOM | 638 | CD1 | LEU | A | 17 | 1.553 | 6.145 | 3.445 |
| ATOM | 639 | CD2 | LEU | A | 17 | 2.723 | 7.190 | 1.492 |
| ATOM | 640 | N | TYR | A | 18 | 2.581 | 9.029 | 6.418 |
| ATOM | 641 | CA | TYR | A | 18 | 3.706 | 9.501 | 7.196 |
| ATOM | 642 | C | TYR | A | 18 | 4.434 | 8.333 | 7.835 |
| ATOM | 643 | O | TYR | A | 18 | 4.081 | 7.186 | 7.603 |
| ATOM | 644 | CB | TYR | A | 18 | 3.222 | 10.458 | 8.281 |
| ATOM | 645 | CG | TYR | A | 18 | 2.386 | 9.782 | 9.346 |
| ATOM | 646 | CD1 | TYR | A | 18 | 1.029 | 9.527 | 9.147 |
| ATOM | 647 | CD2 | TYR | A | 18 | 2.961 | 9.379 | 10.550 |
| ATOM | 648 | CE1 | TYR | A | 18 | 0.273 | 8.894 | 10.128 |
| ATOM | 649 | CE2 | TYR | A | 18 | 2.218 | 8.745 | 11.526 |
| ATOM | 650 | CZ | TYR | A | 18 | 0.877 | 8.508 | 11.317 |
| ATOM | 651 | OH | TYR | A | 18 | 0.134 | 7.922 | 12.318 |
| ATOM | 652 | N | LEU | A | 19 | 5.439 | 8.651 | 8.650 |
| ATOM | 653 | CA | LEU | A | 19 | 6.255 | 7.661 | 9.347 |
| ATOM | 654 | C | LEU | A | 19 | 6.210 | 7.946 | 10.847 |
| ATOM | 655 | O | LEU | A | 19 | 6.685 | 8.992 | 11.288 |
| ATOM | 656 | CB | LEU | A | 19 | 7.701 | 7.763 | 8.871 |
| ATOM | 657 | CG | LEU | A | 19 | 7.901 | 7.850 | 7.359 |
| ATOM | 658 | CD1 | LEU | A | 19 | 9.300 | 8.379 | 7.039 |
| ATOM | 659 | CD2 | LEU | A | 19 | 7.669 | 6.482 | 6.748 |

120. The functionalized biomaterial according to claim 114, wherein said solid ceramic component is selected from a granulated ceramic powder or ceramic scaffold; and/or a gel ceramic component.

121. The functionalized biomaterial according to claim 114, wherein the collagen is selected from collagen type I, II, III and/or XI.

The application's sequence listing, which the Patent Office published only in electronic form, follows.

SEQUENCE LISTING (6622 sequences)

SEQ ID NO: 1 - protein, 21 aa, synthetic construct
  REGION 1..21: note = GFR-binding peptide
  VARIANT 7..8: note = Xaa is C or S
CGSAGPXXVPTKMSAISMLYL

SEQ ID NO: 2 - protein, 21 aa, synthetic construct
  REGION 1..21: note = GFR-binding peptide
  VARIANT 7..8: note = Xaa is C or S
CAAPASXXVPTRLSAISMLYL

SEQ ID NO: 3 - protein, 21 aa, synthetic construct
  REGION 1..21: note = GFR-binding peptide
  VARIANT 7..8: note = Xaa is C or S
CSTPPTXXVPTRLSAISMLYL

SEQ ID NO: 4 - protein, 21 aa, synthetic construct
  REGION 1..21: note = GFR-binding peptide
  VARIANT 8: note = Xaa is C or S
CNDEGLEXAPTEENAISVLYF

SEQ ID NO: 5 - protein, 21 aa, synthetic construct
  REGION 1..21: note = GFR-binding peptide
  VARIANT 8: note = Xaa is C or S
CNDEGLEXAPTGQNAISVLYF

SEQ ID NO: 6 - protein, 21 aa, synthetic construct
  REGION 1..21: note = GFR-binding peptide
  VARIANT 7..8: note = Xaa is C or S
CKIPKAXXVPTELSATSVLYY

SEQ ID NO: 7 - protein, 21 aa, synthetic construct
  REGION 1..21: note = GFR-binding peptide
  VARIANT 7..8: note = Xaa is C or S
CGIPEPXXVPEKMSATSVLYY

SEQ ID NO: 8 - protein, 21 aa, synthetic construct
  REGION 1..21: note = GFR-binding peptide
  VARIANT 7..8: note = Xaa is C or S
CGSAGPXXVPTKMSPISVLYK

SEQ ID NO: 9 - protein, 21 aa, synthetic construct
  REGION 1..21: note = GFR-binding peptide
  VARIANT 8: note = Xaa is C or S
CHVTKPTXVPEKLSSLSILFF

SEQ ID NO: 10 - protein, 21 aa, synthetic construct
  REGION 1..21: note = GFR-binding peptide
  VARIANT 7..8: note = Xaa is C or S
CKVGKAXXVSQKLEPLTILYY

SEQ ID NO: 11 - protein, 21 aa, synthetic construct
  REGION 1..21: note = GFR-binding peptide
  VARIANT 6: note = Xaa is C or S
CRNVQXRPTQVQLNAISVLYF

SEQ ID NO: 12 - protein, 21 aa, synthetic construct
  REGION 1..21: note = GFR-binding peptide
  VARIANT 7..8: note = Xaa is C or S
CHVPKPXXAPTKLSAISMLYL

SEQ ID NO: 13 - protein, 21 aa, synthetic construct
  REGION 1..21: note = GFR-binding peptide
  VARIANT 7..8: note = Xaa is C or S
CKVGKAXXVPTKLEPLTILYY

SEQ ID NO: 14 - protein, 21 aa, synthetic construct
  REGION 1..21: note = GFR-binding peptide
  VARIANT 6: note = Xaa is C or S
CRNVQXRPTQVQLSAISMLYL

SEQ ID NO: 15 - protein, 21 aa, synthetic construct
  REGION 1..21: note = GFR-binding peptide
  VARIANT 7..8: note = Xaa is C or S
CASASPXXVSQDLSAISMLYL

SEQ ID NO: 16 - protein, 21 aa, synthetic construct
  REGION 1..21: note = GFR-binding peptide
  VARIANT 7..8: note = Xaa is C or S
CHVPKPXXVPTKLSPISVLYK

SEQ ID NO: 17 - protein, 21 aa, synthetic construct
  REGION 1..21: note = GFR-binding peptide
  VARIANT 8: note = Xaa is C or S
CNDEGLEXVPTGQNAISVLYF

SEQ ID NO: 18 - protein, 21 aa, synthetic construct
  REGION 1..21: note = GFR-binding peptide
  VARIANT 7..8: note = Xaa is C or S
CTVPKPXXAPTQLSAISMLYL

SEQ ID NO: 19 - protein, 21 aa, synthetic construct
  REGION 1..21: note = GFR-binding peptide
  VARIANT 7..8: note = Xaa is C or S
CAVPKAXXAPTKLSAISMLYL

SEQ ID NO: 20 - protein, 21 aa, synthetic construct
  REGION 1..21: note = GFR-binding peptide
  VARIANT 7..8: note = Xaa is C or S
CKVGKAXXVPTKLSAISMLYL

SEQ ID NO: 21 - protein, 21 aa, synthetic construct
  REGION 1..21: note = GFR-binding peptide
  VARIANT 7..8: note = Xaa is C or S
CGGGKAXXVPTKLSAISMLYL

SEQ ID NO: 22 - protein, 24 aa, synthetic construct
  REGION 1..24: note = GFR-binding peptide
  VARIANT 10..11: note = Xaa is C or S
WWFWGSAGPXXTPTKMSAISMLYL

SEQ ID NO: 23 - protein, 25 aa, synthetic construct
  REGION 1..25: note = GFR-binding peptide
  VARIANT 12: note = Xaa is C or S
GTPGPHVTKPTXVPTKLSAISMLYL

SEQ ID NO: 24 - protein, 18 aa, synthetic construct
  REGION 1..18: note = GFR-binding peptide
GTPGPVPQELEPLTILYY

SEQ ID NO: 25 - protein, 18 aa, synthetic construct
  REGION 1..18: note = GFR-binding peptide
GTPGPVPTELSPISVLYK

SEQ ID NO: 26 - protein, 21 aa, synthetic construct
  REGION 1..21: note = GFR-binding peptide
  VARIANT 7..8: note = Xaa is C or S
GTPGPAXXVPTKLSAISMLYL

SEQ ID NO: 27 - protein, 18 aa, synthetic construct
  REGION 1..18: note = GFR-binding peptide
GTPGPVPTGQSAISMLYL

SEQ ID NO: 28 - protein, 18 aa, synthetic construct
  REGION 1..18: note = GFR-binding peptide
GTPGPVPTEESAISMLYL

SEQ ID NO: 29 - protein, 21 aa, synthetic construct
  REGION 1..21: note = GFR-binding peptide
GTPGPPTSVPTKLSPISVLYK

SEQ ID NO: 30 - protein, 21 aa, synthetic construct
  REGION 1..21: note = GFR-binding peptide
  VARIANT 7..8: note = Xaa is C or S
GTPGPPXXVPTKLSPISVLYK

SEQ ID NO: 31 - protein, 25 aa, synthetic construct
  REGION 1..25: note = GFR-binding peptide
  VARIANT 12: note = Xaa is C or S
GTPGPNDEGLEXAPTGQNAISVLYF

SEQ ID NO: 32 - protein, 25 aa, synthetic construct
  REGION 1..25: note = GFR-binding peptide
  VARIANT 11..12: note = Xaa is C or S
WWFWGAAPASXXVPTRLSPISVLYK

SEQ ID NO: 33 - protein, 25 aa, synthetic construct
  REGION 1..25: note = GFR-binding peptide
  VARIANT 11..12: note = Xaa is C or S
WWFWGKASKAXXVPTKLSAISMLYL

SEQ ID NO: 34 - protein, 25 aa, synthetic construct
  REGION 1..25: note = GFR-binding peptide
  VARIANT 11..12: note = Xaa is C or S
GTPGPGSAGPXXTPTKMSAISMLYL

SEQ ID NO: 35 - protein, 25 aa, synthetic construct
  REGION 1..25: note = GFR-binding peptide
  VARIANT 11..12: note = Xaa is C or S
GTPGPAAPASXXVPARLSAISMLYL

SEQ ID NO: 36 - protein, 21 aa, synthetic construct
  REGION 1..21: note = GFR-binding peptide
  VARIANT 7..8: note = Xaa is C or S
CAVPKAXXAPTKLEPLPIVYY

SEQ ID NO: 37 - protein, 21 aa, synthetic construct
  REGION 1..21: note = GFR-binding peptide
  VARIANT 7..8: note = Xaa is C or S
CKIPKAXXVSQELEPLTILYY

SEQ ID NO: 38 - protein, 21 aa, synthetic construct
  REGION 1..21: note = GFR-binding peptide
  VARIANT 7..8: note = Xaa is C or S
CSTPPTXXSRVRLRSVKVAKV

SEQ ID NO: 39 - protein, 21 aa, synthetic construct
  REGION 1..21: note = GFR-binding peptide
  VARIANT 7..8: note = Xaa is C or S
CKVGKAXXVPTKLSNITMQIM

SEQ ID NO: 40 - protein, 21 aa, synthetic construct
  REGION 1..21: note = GFR-binding peptide
  VARIANT 7..8: note = Xaa is C or S
CASASPXXTQVDLRPVQVRKI

SEQ ID NO: 41 - protein, 21 aa, synthetic construct
  REGION 1..21: note = GFR-binding peptide
  VARIANT 7..8: note = Xaa is C or S
CAASKAXXVPEKLSSLSILFF

SEQ ID NO: 42 - protein, 21 aa, synthetic construct
  REGION 1..21: note = GFR-binding peptide
  VARIANT 7..8: note = Xaa is C or S
CGSAGPXXVPEKMSSLSILFF

SEQ ID NO: 43 - protein, 21 aa, synthetic construct
  REGION 1..21: note = GFR-binding peptide
  VARIANT 7..8: note = Xaa is C or S
CRVPSTXXVPAKTSPISILYI

SEQ ID NO: 44 - protein, 21 aa, synthetic construct
  REGION 1..21: note = GFR-binding peptide
  VARIANT 7..8: note = Xaa is C or S
CASAAPXXVPAALSPISILYI

SEQ ID NO: 45 - protein, 21 aa, synthetic construct
  REGION 1..21: note = GFR-binding peptide
  VARIANT 8: note = Xaa is C or S
CNDEGLEXVPAEESPISILYI

SEQ ID NO: 46 - protein, 14 aa, synthetic construct
  REGION 1..14: note = GFR-binding peptide
CVPAGQSPISILYI

SEQ ID NO: 47 - protein, 21 aa, synthetic construct
  REGION 1..21: note = GFR-binding peptide
  VARIANT 8: note = Xaa is C or S
CNDEGLEXVPAEESPISILYI

SEQ ID NO: 48 - protein, 14 aa, synthetic construct
  REGION 1..14: note = GFR-binding peptide
CVPAEESPISILYI

SEQ ID NO: 49 - protein, 21 aa, synthetic construct
  REGION 1..21: note = GFR-binding peptide
  VARIANT 7..8: note = Xaa is C or S
CGIPEPXXVPAKMSPISILYI

SEQ ID NO: 50 - protein, 21 aa, synthetic construct
  REGION 1..21: note = GFR-binding peptide
  VARIANT 7..8: note = Xaa is C or S
CASAAPXXVPQALRPVQVRKI

SEQ ID NO: 51 - protein, 19 aa, synthetic construct
  REGION 1..19: note = GFR-binding peptide
  VARIANT 5..6: note = Xaa is C or S
CASPXXVSQDLRPVQVRKI

SEQ ID NO: 52 - protein, 21 aa, synthetic construct
  REGION 1..21: note = GFR-binding peptide
  VARIANT 7..8: note = Xaa is C or S
CASASPXXVPQDLRPVQVRKI

SEQ ID NO: 53 - protein, 21 aa, synthetic construct
  REGION 1..21: note = GFR-binding peptide
  VARIANT 8: note = Xaa is C or S
CNDEGLEXVPTEERPVQVRKI

SEQ ID NO: 54 - protein, 9 aa, synthetic construct
  REGION 1..9: note = GFR-binding peptide
CRPVQVRKI

SEQ ID NO: 55 - protein, 21 aa, synthetic construct
  REGION 1..21: note = GFR-binding peptide
  VARIANT 7..8: note = Xaa is C or S
CTVPKPXXVPTQLSNITMQIM

SEQ ID NO: 56 - protein, 21 aa, synthetic construct
  REGION 1..21: note = GFR-binding peptide
  VARIANT 7..8: note = Xaa is C or S
CAVPKAXXVPTKLSNITMQIM

SEQ ID NO: 57 - protein, 21 aa, synthetic construct
  REGION 1..21: note = GFR-binding peptide
  VARIANT 7..8: note = Xaa is C or S
CSIPKAXXTPTELSPINMLYF

SEQ ID NO: 58 - protein, 19 aa, synthetic construct
  REGION 1..19: note = GFR-binding peptide
CTKPTSTPTKLSPINMLYF

SEQ ID NO: 59 - protein, 21 aa, synthetic construct
  REGION 1..21: note = GFR-binding peptide
  VARIANT 7..8: note = Xaa is C or S
CYVPKPXXTPTKLSPINMLYF

SEQ ID NO: 60 - protein, 21 aa, synthetic construct
  REGION 1..21: note = GFR-binding peptide
  VARIANT 7..8: note = Xaa is C or S
CASAAPXXVPQALSSLSILFF

SEQ ID NO: 61 - protein, 21 aa, synthetic construct
  REGION 1..21: note = GFR-binding peptide
  VARIANT 7..8: note = Xaa is C or S
CASASPXXVSQDLSSLSILFF

SEQ ID NO: 62 - protein, 21 aa, synthetic construct
  REGION 1..21: note = GFR-binding peptide
  VARIANT 7..8: note = Xaa is C or S
CVVPKPXXAPTQLEPISILYL

SEQ ID NO: 63 - protein, 21 aa, synthetic construct
  REGION 1..21: note = GFR-binding peptide
  VARIANT 7..8: note = Xaa is C or S
CAVPKAXXAPTKLEPISILYL

SEQ ID NO: 64 - protein, 21 aa, synthetic construct
  REGION 1..21: note = GFR-binding peptide
  VARIANT 7..8: note = Xaa is C or S
CKVGKAXXVPTKLEPISILYL

SEQ ID NO: 65 - protein, 21 aa, synthetic construct
  REGION 1..21: note = GFR-binding peptide
  VARIANT 6: note = Xaa is C or S
CSSVKXQPSRVHHKPLSMLYV

SEQ ID NO: 66 - protein, 21 aa, synthetic construct
  REGION 1..21: note = GFR-binding peptide
  VARIANT 6: note = Xaa is C or S
CRNVQXRPTQVQLKPLSMLYV

SEQ ID NO: 67 - protein, 21 aa, synthetic construct
  REGION 1..21: note = GFR-binding peptide
  VARIANT 7..8: note = Xaa is C or S
CKIPKAXXVPQELEPLPIVYY

SEQ ID NO: 68 - protein, 21 aa, synthetic construct
  REGION 1..21: note = GFR-binding peptide
  VARIANT 7..8: note = Xaa is C or S
CGIPEPXXVPQKMEPLPIVYY

SEQ ID NO: 69 - protein, 21 aa, synthetic construct
  REGION 1..21: note = GFR-binding peptide
  VARIANT 7..8: note = Xaa is C or S
CSIPKAXXVPQELEPLPIVYY

SEQ ID NO: 70 - protein, 21 aa, synthetic construct
  REGION 1..21: note = GFR-binding peptide
  VARIANT 7..8: note = Xaa is C or S
CASAAPXXVPQALEPLTILYY

SEQ ID NO: 71 - protein, 21 aa, synthetic construct
  REGION 1..21: note = GFR-binding peptide
  VARIANT 7..8: note = Xaa is C or S
CASASPXXVSQDLEPLTILYY

SEQ ID NO: 72 - protein, 21 aa, synthetic construct
  REGION 1..21: note = GFR-binding peptide
  VARIANT 8: note = Xaa is C or S
CNDEGLEXVPTEEEPLTILYY

SEQ ID NO: 73 - protein, 21 aa, synthetic construct
  REGION 1..21: note = GFR-binding peptide
  VARIANT 8: note = Xaa is C or S
CNDEGLEXVPTEESSLSILFF

SEQ ID NO: 74 - protein, 21 aa, synthetic construct
  REGION 1..21: note = GFR-binding peptide
  VARIANT 7..8: note = Xaa is C or S
CKASKAXXVPTKLSNITMQIM

SEQ ID NO: 75 - protein, 21 aa, synthetic construct
  REGION 1..21: note = GFR-binding peptide
  VARIANT 7..8: note = Xaa is C or S
CGSAGPXXTPTKMSNITMQIM

SEQ ID NO: 76 - protein, 21 aa, synthetic construct
  REGION 1..21: note = GFR-binding peptide
  VARIANT 7..8: note = Xaa is C or S
CAAPASXXVPARLSNITMQIM

SEQ ID NO: 77 - protein, 21 aa, synthetic construct
  REGION 1..21: note = GFR-binding peptide
  VARIANT 7..8: note = Xaa is C or S
CRVPSTXXAPTKTSATSVLYY

SEQ ID NO: 78 - protein, 21 aa, synthetic construct
  REGION 1..21: note = GFR-binding peptide
  VARIANT 7..8: note = Xaa is C or S
CASAAPXXAPTALSATSVLYY

SEQ ID NO: 79 - protein, 21 aa, synthetic construct
  REGION 1..21: note = GFR-binding peptide
  VARIANT 7..8: note = Xaa is C or S
CASASPXXAPTDLSATSVLYY

SEQ ID NO: 80 - protein, 21 aa, synthetic construct
  REGION 1..21: note = GFR-binding peptide
  VARIANT 7..8: note = Xaa is C or S
CSIPKAXXVPTELRSVKVAKV

SEQ ID NO: 81 - protein, 21 aa, synthetic construct
  REGION 1..21: note = GFR-binding peptide
  VARIANT 8: note = Xaa is C or S
CHVTKPTXAPTKLRSVKVAKV

SEQ ID NO: 82 - protein, 21 aa, synthetic construct
  REGION 1..21: note = GFR-binding peptide
  VARIANT 7..8: note = Xaa is C or S
CTVPKPXXAPTQLRSVKVAKV

SEQ ID NO: 83 - protein, 21 aa, synthetic construct
  REGION 1..21: note = GFR-binding peptide
  VARIANT 7..8: note = Xaa is C or S
CKVGKAXXVPQKLEPLPIVYY

SEQ ID NO: 84 - protein, 21 aa, synthetic construct
  REGION 1..21: note = GFR-binding peptide
  VARIANT 7..8: note = Xaa is C or S
CKASKAXXVPQKLEPLPIVYY

SEQ ID NO: 85 - protein, 21 aa, synthetic construct
  REGION 1..21: note = GFR-binding peptide
  VARIANT 6: note = Xaa is C or S
CRNVQXRPVPTQLSPISVLYK

SEQ ID NO: 86 - protein, 21 aa, synthetic construct
  REGION 1..21: note = GFR-binding peptide
  VARIANT 7..8: note = Xaa is C or S
CKIPKAXXVPTELSPISVLYK

SEQ ID NO: 87 - protein, 21 aa, synthetic construct
  REGION 1..21: note = GFR-binding peptide
  VARIANT 7..8: note = Xaa is C or S
CASAAPXXVPQALRSVKVAKV

SEQ ID NO: 88 - protein, 14 aa, synthetic construct
  REGION 1..14: note = GFR-binding peptide
CVSQDLRSVKVAKV

SEQ ID NO: 89 - protein, 21 aa, synthetic construct
  REGION 1..21: note = GFR-binding peptide
  VARIANT 7..8: note = Xaa is C or S
CASASPXXVPQDLRSVKVAKV

SEQ ID NO: 90 - protein, 21 aa, synthetic construct
  REGION 1..21: note = GFR-binding peptide
  VARIANT 8: note = Xaa is C or S
CNDEGLEXVPTEERSVKVAKV

SEQ ID NO: 91 - protein, 14 aa, synthetic construct
  REGION 1..14: note = GFR-binding peptide
CTQVKMRPVQVRKI

SEQ ID NO: 92 - protein, 21 aa, synthetic construct
  REGION 1..21: note = GFR-binding peptide
  VARIANT 7..8: note = Xaa is C or S
CSIPKAXXTQVELRPVQVRKI

SEQ ID NO: 93 - protein, 21 aa, synthetic construct
  REGION 1..21: note = GFR-binding peptide
  VARIANT 7..8: note = Xaa is C or S
CKIPKAXXTPTELSPINMLYF

SEQ ID NO: 94 - protein, 21 aa, synthetic construct
  REGION 1..21: note = GFR-binding peptide
  VARIANT 7..8: note = Xaa is C or S
CGIPEPXXTPTKMSPINMLYF

SEQ ID NO: 95 - protein, 14 aa, synthetic construct
  REGION 1..14: note = GFR-binding peptide
CVPTGQSAISMLYL

SEQ ID NO: 96 - protein, 21 aa, synthetic construct
  REGION 1..21: note = GFR-binding peptide
  VARIANT 8: note = Xaa is C or S
CNDEGLEXVPTEESAISMLYL

SEQ ID NO: 97 - protein, 21 aa, synthetic construct
  REGION 1..21: note = GFR-binding peptide
  VARIANT 8: note = Xaa is C or S
CNDEGLEXVPTEESPISILYI

SEQ ID NO: 98 - protein, 21 aa, synthetic construct
  REGION 1..21: note = GFR-binding peptide
  VARIANT 6: note = Xaa is C or S
CVVVKXQPSRVHHSPISILYI

SEQ ID NO: 99 - protein, 21 aa, synthetic construct
  REGION 1..21: note = GFR-binding peptide
  VARIANT 6: note = Xaa is C or S
CSSVKXQPSRVHHSPISILFI

SEQ ID NO: 100 - protein, 21 aa, synthetic construct
  REGION 1..21: note = GFR-binding peptide
  VARIANT 6: note = Xaa is C or S
CRNVQXRPTQVQLSPISILFI

SEQ ID NO: 101 - protein, 21 aa, synthetic construct
  REGION 1..21: note = GFR-binding peptide
  VARIANT 7..8: note = Xaa is C or S
CYVPKPXXAPTKLNAISVLYF

SEQ ID NO: 102 - protein, 21 aa, synthetic construct
  REGION 1..21: note = GFR-binding peptide
  VARIANT 7..8: note = Xaa is C or S
CRVPSTXXVPTKTSAISMLYL

SEQ ID NO: 103 - protein, 21 aa, synthetic construct
  REGION 1..21: note = GFR-binding peptide
  VARIANT 7..8: note = Xaa is C or S
CHVPKPXXAPTKLEPISILYL

SEQ ID NO: 104 - protein, 21 aa, synthetic construct
  REGION 1..21: note = GFR-binding peptide
  VARIANT 7..8: note = Xaa is C or S
CRVPSTXXAPVKTEPISILYL

SEQ ID NO: 105 - protein, 20 aa, synthetic construct
  REGION 1..20: note = GFR-binding peptide
  VARIANT 6..7: note = Xaa is C or S
GIPEPXXVPTKMSAISMLYL

SEQ ID NO: 106 - protein, 20 aa, synthetic construct
  REGION 1..20: note = GFR-binding peptide
  VARIANT 7: note = Xaa is C or S
HVTKPTXVPTKLSAISMLYL

SEQ ID NO: 107 - protein, 20 aa, synthetic construct
  REGION 1..20: note = GFR-binding peptide
  VARIANT 6..7: note = Xaa is C or S
YVPKPXXVPTKLSAISMLYL

SEQ ID NO: 108 - protein, 20 aa, synthetic construct
  REGION 1..20: note = GFR-binding peptide
  VARIANT 6..7: note = Xaa is C or S
TVPKPXXVPTQLSAISMLYL

SEQ ID NO: 109 - protein, 20 aa, synthetic construct
  REGION 1..20: note = GFR-binding peptide
  VARIANT 6..7: note = Xaa is C or S
AVPKAXXVPTKLSAISMLYL

SEQ ID NO: 110 - protein, 20 aa, synthetic construct
  REGION 1..20: note = GFR-binding peptide
  VARIANT 6..7: note = Xaa is C or S
KASKAXXVPTKLSAISMLYL

SEQ ID NO: 111 - protein, 20 aa, synthetic construct
  REGION 1..20: note = GFR-binding peptide
  VARIANT 6..7: note = Xaa is C or S
HVPKPXXVPTKLSAISMLYL

SEQ ID NO: 112 - protein, 20 aa, synthetic construct
  REGION 1..20: note = GFR-binding peptide
  VARIANT 6..7: note = Xaa is C or S
ASAAPXXVPTALSAISMLYL

SEQ ID NO: 113 - protein, 20 aa, synthetic construct
  REGION 1..20: note = GFR-binding peptide
  VARIANT 6..7: note = Xaa is C or S
ASASPXXVPTDLSAISMLYL

SEQ ID NO: 114 - protein, 20 aa, synthetic construct
  REGION 1..20: note = GFR-binding peptide
  VARIANT 6..7: note = Xaa is C or S
ASASPXXVPTDLSAISMLYL

SEQ ID NO: 115 - protein, 20 aa, synthetic construct
  REGION 1..20: note = GFR-binding peptide
  VARIANT 6..7: note = Xaa is C or S
GIPEPXXVPEKMSAISMLYL

SEQ ID NO: 116 - protein, 20 aa, synthetic construct
  REGION 1..20: note = GFR-binding peptide
  VARIANT 7: note = Xaa is C or S
HVTKPTXAPTKLSAISMLYL

SEQ ID NO: 117 - protein, 20 aa, synthetic construct
  REGION 1..20: note = GFR-binding peptide
  VARIANT 6..7: note = Xaa is C or S
YVPKPXXAPTKLSAISMLYL

SEQ ID NO: 118 - protein, 20 aa, synthetic construct
  REGION 1..20: note = GFR-binding peptide
  VARIANT 6..7: note = Xaa is C or S
GSAGPXXTPTKMSAISMLYL

SEQ ID NO: 119 - protein, 20 aa, synthetic construct
  REGION 1..20: note = GFR-binding peptide
  VARIANT 6..7: note = Xaa is C or S
AAPASXXVPARLSAISMLYL

SEQ ID NO: 120 - protein, 20 aa, synthetic construct
  REGION 1..20: note = GFR-binding peptide
  VARIANT 6..7: note = Xaa is C or S
RVPSTXXAPVKTSAISMLYL

SEQ ID NO: 121 - protein, 20 aa, synthetic construct
  REGION 1..20: note = GFR-binding peptide
  VARIANT 6..7: note = Xaa is C or S
ASAAPXXVPQALSAISMLYL

SEQ ID NO: 122 - protein, 20 aa, synthetic construct
  REGION 1..20: note = GFR-binding peptide
  VARIANT 6..7: note = Xaa is C or S
ASASPXXVPQDLSAISMLYL

SEQ ID NO: 123 - protein, 20 aa, synthetic construct
  REGION 1..20: note = GFR-binding peptide
  VARIANT 5: note = Xaa is C or S
SSVKXQPSRVHHSAISMLYL

SEQ ID NO: 124 - protein, 20 aa, synthetic construct
  REGION 1..20: note = GFR-binding peptide
  VARIANT 6..7: note = Xaa is C or S
KIPKAXXVPEELSSLSILFF

SEQ ID NO: 125 - protein, 20 aa, synthetic construct
  REGION 1..20: note = GFR-binding peptide
  VARIANT 6..7: note = Xaa is C or S
SIPKAXXVPEELSSLSILFF

SEQ ID NO: 126 - protein, 20 aa, synthetic construct
  REGION 1..20: note = GFR-binding peptide
  VARIANT 6..7: note = Xaa is C or S
YVPKPXXVPEKLSSLSILFF

SEQ ID NO: 127 - protein, 20 aa, synthetic construct
  REGION 1..20: note = GFR-binding peptide
  VARIANT 6..7: note = Xaa is C or S
TVPKPXXVPEQLSSLSILFF

SEQ ID NO: 128 - protein, 20 aa, synthetic construct
  REGION 1..20: note = GFR-binding peptide
  VARIANT 6..7: note = Xaa is C or S
AVPKAXXVPEKLSSLSILFF

SEQ ID NO: 129 - protein, 20 aa, synthetic construct
  REGION 1..20: note = GFR-binding peptide
  VARIANT 6..7: note = Xaa is C or S
KVGKAXXVPEKLSSLSILFF

SEQ ID NO: 130 - protein, 20 aa, synthetic construct
  REGION 1..20: note = GFR-binding peptide
  VARIANT 6..7: note = Xaa is C or S
KASKAXXVPEKLSSLSILFF

SEQ ID NO: 131 - protein, 20 aa, synthetic construct
  REGION 1..20: note = GFR-binding peptide
  VARIANT 6..7: note = Xaa is C or S
AAPASXXVPERLSSLSILFF

SEQ ID NO: 132 - protein, 20 aa, synthetic construct
  REGION 1..20: note = GFR-binding peptide
  VARIANT 6..7: note = Xaa is C or S
STPPTXXVPERLSSLSILFF

SEQ ID NO: 133 - protein, 20 aa, synthetic construct
  REGION 1..20: note = GFR-binding peptide
  VARIANT 6..7: note = Xaa is C or S
HVPKPXXVPEKLSSLSILFF

SEQ ID NO: 134 - protein, 20 aa, synthetic construct
  REGION 1..20: note = GFR-binding peptide
  VARIANT 6..7: note = Xaa is C or S
RVPSTXXVPEKTSSLSILFF

SEQ ID NO: 135 - protein, 20 aa, synthetic construct
  REGION 1..20: note = GFR-binding peptide
  VARIANT 6..7: note = Xaa is C or S
ASAAPXXVPEALSSLSILFF

SEQ ID NO: 136 - protein, 20 aa, synthetic construct
  REGION 1..20: note = GFR-binding peptide
  VARIANT 6..7: note = Xaa is C or S
ASASPXXVPEDLSSLSILFF

SEQ ID NO: 137 - protein, 20 aa, synthetic construct
  REGION 1..20: note = GFR-binding peptide
  VARIANT 6..7: note = Xaa is C or S
ASASPXXVPEDLSSLSILFF

SEQ ID NO: 138 - protein, 20 aa, synthetic construct
  REGION 1..20: note = GFR-binding peptide
  VARIANT 6..7: note = Xaa is C or S
KIPKAXXVPTELSSLSILFF

SEQ ID NO: 139 - protein, 20 aa, synthetic construct
  REGION 1..20: note = GFR-binding peptide
  VARIANT 6..7: note = Xaa is C or S
SIPKAXXVPTELSSLSILFF

SEQ ID NO: 140 - protein, 20 aa, synthetic construct
  REGION 1..20: note = GFR-binding peptide
  VARIANT 7: note = Xaa is C or S
HVTKPTXAPTKLSSLSILFF

SEQ ID NO: 141 - protein, 20 aa, synthetic construct
  REGION 1..20: note = GFR-binding peptide
  VARIANT 6..7: note = Xaa is C or S
YVPKPXXAPTKLSSLSILFF

SEQ ID NO: 142 - protein, 20 aa, synthetic construct
  REGION 1..20: note = GFR-binding peptide
  VARIANT 6..7: note = Xaa is C or S
TVPKPXXAPTQLSSLSILFF

SEQ ID NO: 143 - protein, 20 aa, synthetic construct
  REGION 1..20: note = GFR-binding peptide
  VARIANT 6..7: note = Xaa is C or S
AVPKAXXAPTKLSSLSILFF

SEQ ID NO: 144 - protein, 20 aa, synthetic construct
  REGION 1..20: note = GFR-binding peptide
  VARIANT 6..7: note = Xaa is C or S
KVGKAXXVPTKLSSLSILFF

SEQ ID NO: 145 - protein, 20 aa, synthetic construct
  REGION 1..20: note = GFR-binding peptide
  VARIANT 6..7: note = Xaa is C or S
KASKAXXVPTKLSSLSILFF

SEQ ID NO: 146 - protein, 20 aa, synthetic construct
  REGION 1..20: note = GFR-binding peptide
  VARIANT 6..7: note = Xaa is C or S
GSAGPXXTPTKMSSLSILFF

SEQ ID NO: 147 - protein, 20 aa, synthetic construct
  REGION 1..20: note = GFR-binding peptide
  VARIANT 6..7: note = Xaa is C or S
AAPASXXVPARLSSLSILFF

SEQ ID NO: 148 - protein, 20 aa, synthetic construct
  REGION 1..20: note = GFR-binding peptide
  VARIANT 6..7: note = Xaa is C or S
STPPTXXVPTRLSSLSILFF

SEQ ID NO: 149 - protein, 20 aa, synthetic construct
  REGION 1..20: note = GFR-binding peptide
  VARIANT 6..7: note = Xaa is C or S
HVPKPXXAPTKLSSLSILFF

SEQ ID NO: 150 - protein, 20 aa, synthetic construct
  REGION 1..20: note = GFR-binding peptide
  VARIANT 6..7: note = Xaa is C or S
RVPSTXXAPVKTSSLSILFF

SEQ ID NO: 151 - protein, 20 aa, synthetic construct
  REGION 1..20: note = GFR-binding peptide
  VARIANT 6..7: note = Xaa is C or S
ASASPXXVPQDLSSLSILFF

SEQ ID NO: 152 - protein, 20 aa, synthetic construct
  REGION 1..20: note = GFR-binding peptide
  VARIANT 7: note = Xaa is C or S
NDEGLEXVPTGQSSLSILFF

SEQ ID NO: 153 - protein, 20 aa, synthetic construct
  REGION 1..20: note = GFR-binding peptide
  VARIANT 5: note = Xaa is C or S
SSVKXQPSRVHHSSLSILFF

SEQ ID NO: 154 - protein, 20 aa, synthetic construct
  REGION 1..20: note = GFR-binding peptide
  VARIANT 5: note = Xaa is C or S
RNVQXRPTQVQLSSLSILFF

SEQ ID NO: 155 - protein, 20 aa, synthetic construct
  REGION 1..20: note = GFR-binding peptide
  VARIANT 6..7: note = Xaa is C or S
KIPKAXXAPTELNAISVLYF

SEQ ID NO: 156 - protein, 20 aa, synthetic construct
  REGION 1..20: note = GFR-binding peptide
  VARIANT 6..7: note = Xaa is C or S
GIPEPXXAPTKMNAISVLYF

SEQ ID NO: 157 - protein, 20 aa, synthetic construct
  REGION 1..20: note = GFR-binding peptide
  VARIANT 6..7: note = Xaa is C or S
SIPKAXXAPTELNAISVLYF

SEQ ID NO: 158 - protein, 20 aa, synthetic construct
  REGION 1..20: note = GFR-binding peptide
  VARIANT 6..7: note = Xaa is C or S
AVPKAXXAPTKLNAISVLYF

SEQ ID NO: 159 - protein, 20 aa, synthetic construct
  REGION 1..20: note = GFR-binding peptide
  VARIANT 6..7: note = Xaa is C or S
KVGKAXXAPTKLNAISVLYF

SEQ ID NO: 160 - protein, 20 aa, synthetic construct
  REGION 1..20: note = GFR-binding peptide
  VARIANT 6..7: note = Xaa is C or S
KASKAXXAPTKLNAISVLYF

SEQ ID NO: 161 - protein, 20 aa, synthetic construct
  REGION 1..20: note = GFR-binding peptide
  VARIANT 6..7: note = Xaa is C or S
GSAGPXXAPTKMNAISVLYF

SEQ ID NO: 162 - protein, 20 aa, synthetic construct
  REGION 1..20: note = GFR-binding peptide
  VARIANT 6..7: note = Xaa is C or S
AAPASXXAPTRLNAISVLYF

SEQ ID NO: 163 - protein, 20 aa, synthetic construct
  REGION 1..20: note = GFR-binding peptide
  VARIANT 6..7: note = Xaa is C or S
STPPTXXAPTRLNAISVLYF

SEQ ID NO: 164 - protein, 20 aa, synthetic construct
  REGION 1..20: note = GFR-binding peptide
  VARIANT 6..7: note = Xaa is C or S
RVPSTXXAPTKTNAISVLYF

SEQ ID NO: 165 - protein, 20 aa, synthetic construct
  REGION 1..20: note = GFR-binding peptide
  VARIANT 6..7: note = Xaa is C or S
ASAAPXXAPTALNAISVLYF

SEQ ID NO: 166 - protein, 20 aa, synthetic construct
  REGION 1..20: note = GFR-binding peptide
  VARIANT 6..7: note = Xaa is C or S
ASASPXXAPTDLNAISVLYF

SEQ ID NO: 167 - protein, 20 aa, synthetic construct
  REGION 1..20: note = GFR-binding peptide
  VARIANT 6..7: note = Xaa is C or S
ASASPXXAPTDLNAISVLYF

SEQ ID NO: 168 - protein, 20 aa, synthetic construct
  REGION 1..20: note = GFR-binding peptide
  VARIANT 6..7: note = Xaa is C or S
KIPKAXXVPTELNAISVLYF

SEQ ID NO: 169 - protein, 20 aa, synthetic construct
  REGION 1..20: note = GFR-binding peptide
  VARIANT 6..7: note = Xaa is C or S
GIPEPXXVPEKMNAISVLYF

SEQ ID NO: 170 - protein, 20 aa, synthetic construct
  REGION 1..20: note = GFR-binding peptide
  VARIANT 6..7: note = Xaa is C or S
SIPKAXXVPTELNAISVLYF

SEQ ID NO: 171 - protein, 20 aa, synthetic construct
  REGION 1..20: note = GFR-binding peptide
  VARIANT 6..7: note = Xaa is C or S
KVGKAXXVPTKLNAISVLYF

SEQ ID NO: 172 - protein, 20 aa, synthetic construct
  REGION 1..20: note = GFR-binding peptide
  VARIANT 6..7: note = Xaa is C or S
KASKAXXVPTKLNAISVLYF

SEQ ID NO: 173 - protein, 20 aa, synthetic construct
  REGION 1..20: note = GFR-binding peptide
  VARIANT 6..7: note = Xaa is C or S
GSAGPXXTPTKMNAISVLYF

SEQ ID NO: 174 - protein, 20 aa, synthetic construct
  REGION 1..20: note = GFR-binding peptide
  VARIANT 6..7: note = Xaa is C or S
AAPASXXVPARLNAISVLYF

SEQ ID NO: 175 - protein, 20 aa, synthetic construct
  REGION 1..20: note = GFR-binding peptide
  VARIANT 6..7: note = Xaa is C or S
STPPTXXVPTRLNAISVLYF

SEQ ID NO: 176 - protein, 20 aa, synthetic construct
  REGION 1..20: note = GFR-binding peptide
  VARIANT 6..7: note = Xaa is C or S
RVPSTXXAPVKTNAISVLYF

SEQ ID NO: 177 - protein, 20 aa, synthetic construct
  REGION 1..20: note = GFR-binding peptide
  VARIANT 6..7: note = Xaa is C or S
ASAAPXXVPQALNAISVLYF

SEQ ID NO: 178 - protein, 20 aa, synthetic construct
  REGION 1..20: note = GFR-binding peptide
  VARIANT 6..7: note = Xaa is C or S
ASASPXXVSQDLNAISVLYF

SEQ ID NO: 179 - protein, 20 aa, synthetic construct
  REGION 1..20: note = GFR-binding peptide
  VARIANT 6..7: note = Xaa is C or S
ASASPXXVPQDLNAISVLYF

SEQ ID NO: 180 - protein, 20 aa, synthetic construct
  REGION 1..20: note = GFR-binding peptide
  VARIANT 7: note = Xaa is C or S
NDEGLEXVPTEENAISVLYF

SEQ ID NO: 181 - protein, 20 aa, synthetic construct
  REGION 1..20: note = GFR-binding peptide
  VARIANT 5: note = Xaa is C or S
SSVKXQPSRVHHNAISVLYF

SEQ ID NO: 182 - protein, 20 aa, synthetic construct
  REGION 1..20: note = GFR-binding peptide
  VARIANT 6..7: note = Xaa is C or S
KIPKAXXAPTELSATSVLYY

SEQ ID NO: 183 - protein, 20 aa, synthetic construct
  REGION 1..20: note = GFR-binding peptide
  VARIANT 6..7: note = Xaa is C or S
GIPEPXXAPTKMSATSVLYY

SEQ ID NO: 184 - protein, 20 aa, synthetic construct
  REGION 1..20: note = GFR-binding peptide
  VARIANT 6..7: note = Xaa is C or S
SIPKAXXAPTELSATSVLYY

SEQ ID NO: 185 - protein, 20 aa, synthetic construct
  REGION 1..20: note = GFR-binding peptide
  VARIANT 7: note = Xaa is C or S
HVTKPTXAPTKLSATSVLYY

SEQ ID NO: 186 - protein, 20 aa, synthetic construct
  REGION 1..20: note = GFR-binding peptide
  VARIANT 6..7: note = Xaa is C or S
YVPKPXXAPTKLSATSVLYY

SEQ ID NO: 187 - protein, 20 aa, synthetic construct
  REGION 1..20: note = GFR-binding peptide
  VARIANT 6..7: note = Xaa is C or S
TVPKPXXAPTQLSATSVLYY

SEQ ID NO: 188 - protein, 20 aa, synthetic construct
  REGION 1..20: note = GFR-binding peptide
  VARIANT 6..7: note = Xaa is C or S
KVGKAXXAPTKLSATSVLYY

SEQ ID NO: 189 - protein, 20 aa, synthetic construct
  REGION 1..20: note = GFR-binding peptide
  VARIANT 6..7: note = Xaa is C or S
KASKAXXAPTKLSATSVLYY

SEQ ID NO: 190 - protein, 20 aa, synthetic construct
  REGION 1..20: note = GFR-binding peptide
  VARIANT 6..7: note = Xaa is C or S
GSAGPXXAPTKMSATSVLYY

SEQ ID NO: 191 - protein, 20 aa, synthetic construct
  REGION 1..20: note = GFR-binding peptide
  VARIANT 6..7: note = Xaa is C or S
AAPASXXAPTRLSATSVLYY

SEQ ID NO: 192 - protein, 20 aa, synthetic construct
  REGION 1..20: note = GFR-binding peptide
  VARIANT 6..7: note = Xaa is C or S
STPPTXXAPTRLSATSVLYY

SEQ ID NO: 193 - protein, 20 aa, synthetic construct
  REGION 1..20: note = GFR-binding peptide
  VARIANT 6..7: note = Xaa is C or S
HVPKPXXAPTKLSATSVLYY

SEQ ID NO: 194 - protein, 20 aa, synthetic construct
  REGION 1..20: note = GFR-binding peptide
  VARIANT 6..7: note = Xaa is C or S
SIPKAXXVPTELSATSVLYY

SEQ ID NO: 195 - protein, 20 aa, synthetic construct
  REGION 1..20: note = GFR-binding peptide
  VARIANT 6..7: note = Xaa is C or S
KVGKAXXVPTKLSATSVLYY

SEQ ID NO: 196 - protein, 20 aa, synthetic construct
  REGION 1..20: note = GFR-binding peptide
  VARIANT 6..7: note = Xaa is C or S
KASKAXXVPTKLSATSVLYY

SEQ ID NO: 197 - protein, 20 aa, synthetic construct
  REGION 1..20: note = GFR-binding peptide
  VARIANT 6..7: note = Xaa is C or S
GSAGPXXTPTKMSATSVLYY

SEQ ID NO: 198 - protein, 20 aa, synthetic construct
  REGION 1..20: note = GFR-binding peptide
  VARIANT 6..7: note = Xaa is C or S
AAPASXXVPARLSATSVLYY

SEQ ID NO: 199 - protein, 20 aa, synthetic construct
  REGION 1..20: note = GFR-binding peptide
  VARIANT 6..7: note = Xaa is C or S
STPPTXXVPTRLSATSVLYY

SEQ ID NO: 200 - protein, 20 aa, synthetic construct
  REGION 1..20: note = GFR-binding peptide
  VARIANT 6..7: note = Xaa is C or S
RVPSTXXAPVKTSATSVLYY

SEQ ID NO: 201 - protein, 20 aa, synthetic construct
  REGION 1..20: note = GFR-binding peptide
  VARIANT 6..7: note = Xaa is C or S
ASAAPXXVPQALSATSVLYY

SEQ ID NO: 202 - protein, 20 aa, synthetic construct
  REGION 1..20: note = GFR-binding peptide
  VARIANT 6..7: note = Xaa is C or S
ASASPXXVSQDLSATSVLYY

SEQ ID NO: 203 - protein, 20 aa, synthetic construct
  REGION 1..20: note = GFR-binding peptide
  VARIANT 6..7: note = Xaa is C or S
ASASPXXVPQDLSATSVLYY

SEQ ID NO: 204 - protein, 20 aa, synthetic construct
  REGION 1..20: note = GFR-binding peptide
  VARIANT 7: note = Xaa is C or S
NDEGLEXVPTEESATSVLYY

SEQ ID NO: 205 - protein, 20 aa, synthetic construct
  REGION 1..20: note = GFR-binding peptide
  VARIANT 7: note = Xaa is C or S
NDEGLEXVPTGQSATSVLYY

SEQ ID NO: 206 - protein, 20 aa, synthetic construct
  REGION 1..20: note = GFR-binding peptide
  VARIANT 5: note = Xaa is C or S
SSVKXQPSRVHHSATSVLYY

SEQ ID NO: 207 - protein, 20 aa, synthetic construct
  REGION 1..20: note = GFR-binding peptide
  VARIANT 5: note = Xaa is C or S
RNVQXRPTQVQLSATSVLYY

SEQ ID NO: 208 - protein, 20 aa, synthetic construct
  REGION 1..20: note = GFR-binding peptide
  VARIANT 6..7: note = Xaa is C or S
GIPEPXXVPTKMSPISVLYK

SEQ ID NO: 209 - protein, 20 aa, synthetic construct
  REGION 1..20: note = GFR-binding peptide
  VARIANT 6..7: note = Xaa is C or S
SIPKAXXVPTELSPISVLYK

SEQ ID NO: 210 - protein, 20 aa, synthetic construct
  REGION 1..20: note = GFR-binding peptide
  VARIANT 7: note = Xaa is C or S
HVTKPTXVPTKLSPISVLYK

SEQ ID NO: 211 - protein, 20 aa, synthetic construct
  REGION 1..20: note = GFR-binding peptide
  VARIANT 6..7: note = Xaa is C or S
YVPKPXXVPTKLSPISVLYK

SEQ ID NO: 212 - protein, 20 aa, synthetic construct
  REGION 1..20: note = GFR-binding peptide
  VARIANT 6..7: note = Xaa is C or S
TVPKPXXVPTQLSPISVLYK

SEQ ID NO: 213 - protein, 20 aa, synthetic construct
  REGION 1..20: note = GFR-binding peptide
  VARIANT 6..7: note = Xaa is C or S
AVPKAXXVPTKLSPISVLYK

SEQ ID NO: 214 - protein, 20 aa, synthetic construct
  REGION 1..20: note = GFR-binding peptide
  VARIANT 6..7: note = Xaa is C or S
KASKAXXVPTKLSPISVLYK

SEQ ID NO: 215 - protein, 20 aa, synthetic construct
  REGION 1..20: note = GFR-binding peptide
  VARIANT 6..7: note = Xaa is C or S
AAPASXXVPTRLSPISVLYK

SEQ ID NO: 216 - protein, 20 aa, synthetic construct
  REGION 1..20: note = GFR-binding peptide
  VARIANT 6..7: note = Xaa is C or S
STPPTXXVPTRLSPISVLYK

SEQ ID NO: 217 - protein, 20 aa, synthetic construct
  REGION 1..20: note = GFR-binding peptide
  VARIANT 6..7: note = Xaa is C or S
RVPSTXXVPTKTSPISVLYK

SEQ ID NO: 218 - protein, 20 aa, synthetic construct
  REGION 1..20: note = GFR-binding peptide
  VARIANT 6..7: note = Xaa is C or S
ASAAPXXVPTALSPISVLYK

SEQ ID NO: 219 - protein, 20 aa, synthetic construct
  REGION 1..20: note = GFR-binding peptide
  VARIANT 6..7: note = Xaa is C or S
ASASPXXVPTDLSPISVLYK

SEQ ID NO: 220 - protein, 20 aa, synthetic construct
  REGION 1..20: note = GFR-binding peptide
  VARIANT 6..7: note = Xaa is C or S
ASASPXXVPTDLSPISVLYK

SEQ ID NO: 221 - protein, 20 aa, synthetic construct
  REGION 1..20: note = GFR-binding peptide
  VARIANT 6..7: note = Xaa is C or S
GIPEPXXVPEKMSPISVLYK

SEQ ID NO: 222 - protein, 20 aa, synthetic construct
  REGION 1..20: note = GFR-binding peptide
  VARIANT 7: note = Xaa is C or S
HVTKPTXAPTKLSPISVLYK

SEQ ID NO: 223 - protein, 20 aa, synthetic construct
  REGION 1..20: note = GFR-binding peptide
  VARIANT 6..7: note = Xaa is C or S
YVPKPXXAPTKLSPISVLYK

SEQ ID NO: 224 - protein, 20 aa, synthetic construct
  REGION 1..20: note = GFR-binding peptide
  VARIANT 6..7: note = Xaa is C or S
TVPKPXXAPTQLSPISVLYK

SEQ ID NO: 225 - protein, 20 aa, synthetic construct
  REGION 1..20: note = GFR-binding peptide
  VARIANT 6..7: note = Xaa is C or S
AVPKAXXAPTKLSPISVLYK

SEQ ID NO: 226 - protein, 20 aa, synthetic construct
  REGION 1..20: note = GFR-binding peptide
  VARIANT 6..7: note = Xaa is C or S
GSAGPXXTPTKMSPISVLYK

SEQ ID NO: 227 - protein, 20 aa, synthetic construct
  REGION 1..20: note = GFR-binding peptide
  VARIANT 6..7: note = Xaa is C or S
AAPASXXVPARLSPISVLYK

SEQ ID NO: 228 - protein, 20 aa, synthetic construct
  REGION 1..20: note = GFR-binding peptide
  VARIANT 6..7: note = Xaa is C or S
HVPKPXXAPTKLSPISVLYK

SEQ ID NO: 229 - protein, 20 aa, synthetic construct
  REGION 1..20: note = GFR-binding peptide
  VARIANT 6..7: note = Xaa is C or S
RVPSTXXAPVKTSPISVLYK

SEQ ID NO: 230 - protein, 20 aa, synthetic construct
  REGION 1..20: note = GFR-binding peptide
  VARIANT 6..7: note = Xaa is C or S
ASAAPXXVPQALSPISVLYK

SEQ ID NO: 231 - protein, 20 aa, synthetic construct
  REGION 1..20: note = GFR-binding peptide
  VARIANT 6..7: note = Xaa is C or S
ASASPXXVSQDLSPISVLYK

SEQ ID NO: 232 - protein, 20 aa, synthetic construct
  REGION 1..20: note = GFR-binding peptide
  VARIANT 6..7: note = Xaa is C or S
ASASPXXVPQDLSPISVLYK

SEQ ID NO: 233 - protein, 20 aa, synthetic construct
  REGION 1..20: note = GFR-binding peptide
  VARIANT 5: note = Xaa is C or S
SSVKXQPSRVHHSPISVLYK

SEQ ID NO: 234 - protein, 20 aa, synthetic construct
  REGION 1..20: note = GFR-binding peptide
  VARIANT 5: note = Xaa is C or S
RNVQXRPTQVQLSPISVLYK

SEQ ID NO: 235 - protein, 20 aa, synthetic construct
  REGION 1..20: note = GFR-binding peptide
  VARIANT 6..7: note = Xaa is C or S
KIPKAXXVPTELEPISILYL

SEQ ID NO: 236 - protein, 20 aa, synthetic construct
  REGION 1..20: note = GFR-binding peptide
  VARIANT 6..7: note = Xaa is C or S
GIPEPXXVPTKMEPISILYL

SEQ ID NO: 237 - protein, 20 aa, synthetic construct
  REGION 1..20: note = GFR-binding peptide
  VARIANT 6..7: note = Xaa is C or S
SIPKAXXVPTELEPISILYL

SEQ ID NO: 238 - protein, 20 aa, synthetic construct
  REGION 1..20: note = GFR-binding peptide
  VARIANT 7: note = Xaa is C or S
HVTKPTXVPTKLEPISILYL

SEQ ID NO: 239 - protein, 20 aa, synthetic construct
  REGION 1..20: note = GFR-binding peptide
  VARIANT 6..7: note = Xaa is C or S
YVPKPXXVPTKLEPISILYL

SEQ ID NO: 240 - protein, 20 aa, synthetic construct
  REGION 1..20: note = GFR-binding peptide
  VARIANT 6..7: note = Xaa is C or S
TVPKPXXVPTQLEPISILYL

SEQ ID NO: 241 - protein, 20 aa, synthetic construct
  REGION 1..20: note = GFR-binding peptide
  VARIANT 6..7: note = Xaa is C or S
AVPKAXXVPTKLEPISILYL

SEQ ID NO: 242 - protein, 20 aa, synthetic construct
  REGION 1..20: note = GFR-binding peptide
  VARIANT 6..7: note = Xaa is C or S
GSAGPXXVPTKMEPISILYL

SEQ ID NO: 243 - protein, 20 aa, synthetic construct
  REGION 1..20: note = GFR-binding peptide
  VARIANT 6..7: note = Xaa is C or S
AAPASXXVPTRLEPISILYL

SEQ ID NO: 244 - protein, 20 aa, synthetic construct
  REGION 1..20: note = GFR-binding peptide
  VARIANT 6..7: note = Xaa is C or S
STPPTXXVPTRLEPISILYL

SEQ ID NO: 245 - protein, 20 aa, synthetic construct
  REGION 1..20: note = GFR-binding peptide
  VARIANT 6..7: note = Xaa is C or S
HVPKPXXVPTKLEPISILYL

SEQ ID NO: 246 - protein, 20 aa, synthetic construct
  REGION 1..20: note = GFR-binding peptide
  VARIANT 6..7: note = Xaa is C or S
RVPSTXXVPTKTEPISILYL

SEQ ID NO: 247 - protein, 20 aa, synthetic construct
  REGION 1..20: note = GFR-binding peptide
  VARIANT 6..7: note = Xaa is C or S
ASAAPXXVPTALEPISILYL

SEQ ID NO: 248 - protein, 20 aa, synthetic construct
  REGION 1..20: note = GFR-binding peptide
  VARIANT 6..7: note = Xaa is C or S
ASASPXXVPTDLEPISILYL

SEQ ID NO: 249 - protein, 20 aa, synthetic construct
  REGION 1..20: note = GFR-binding peptide
  VARIANT 6..7: note = Xaa is C or S
ASASPXXVPTDLEPISILYL

SEQ ID NO: 250 - protein, 20 aa, synthetic construct
  REGION 1..20: note = GFR-binding peptide
  VARIANT 6..7: note = Xaa is C or S
GIPEPXXVPEKMEPISILYL

SEQ ID NO: 251 - protein, 20 aa, synthetic construct
  REGION 1..20: note = GFR-binding peptide
  VARIANT 7: note = Xaa is C or S
HVTKPTXAPTKLEPISILYL

SEQ ID NO: 252 - protein, 20 aa, synthetic construct
  REGION 1..20: note = GFR-binding peptide
  VARIANT 6..7: note = Xaa is C or S
YVPKPXXAPTKLEPISILYL

SEQ ID NO: 253 - protein, 20 aa, synthetic construct
  REGION 1..20: note = GFR-binding peptide
  VARIANT 6..7: note = Xaa is C or S
TVPKPXXAPTQLEPISILYL

SEQ ID NO: 254 - protein, 20 aa, synthetic construct
  REGION 1..20: note = GFR-binding peptide
  VARIANT 6..7: note = Xaa is C or S
GSAGPXXTPTKMEPISILYL

SEQ ID NO: 255 - protein, 20 aa, synthetic construct
  REGION 1..20: note = GFR-binding peptide
  VARIANT 6..7: note = Xaa is C or S
AAPASXXVPARLEPISILYL

SEQ ID NO: 256 - protein, 20 aa, synthetic construct
  REGION 1..20: note = GFR-binding peptide
  VARIANT 6..7: note = Xaa is C or S
ASAAPXXVPQALEPISILYL

SEQ ID NO: 257 - protein, 20 aa, synthetic construct
  REGION 1..20: note = GFR-binding peptide
  VARIANT 6..7: note = Xaa is C or S
ASASPXXVSQDLEPISILYL

SEQ ID NO: 258 - protein, 20 aa, synthetic construct
  REGION 1..20: note = GFR-binding peptide
  VARIANT 6..7: note = Xaa is C or S
ASASPXXVPQDLEPISILYL

SEQ ID NO: 259 - protein, 20 aa, synthetic construct
  REGION 1..20: note = GFR-binding peptide
  VARIANT 5: note = Xaa is C or S
SSVKXQPSRVHHEPISILYL

SEQ ID NO: 260 - protein, 20 aa, synthetic construct
  REGION 1..20: note = GFR-binding peptide
  VARIANT 5: note = Xaa is C or S
RNVQXRPTQVQLEPISILYL

SEQ ID NO: 261 - protein, 20 aa, synthetic construct
  REGION 1..20: note = GFR-binding peptide
  VARIANT 7: note = Xaa is C or S
HVTKPTXTPTKLSPINMLYF

SEQ ID NO: 262 - protein, 20 aa, synthetic construct
  REGION 1..20: note = GFR-binding peptide
  VARIANT 6..7: note = Xaa is C or S
TVPKPXXTPTQLSPINMLYF

SEQ ID NO: 263 - protein, 20 aa, synthetic construct
  REGION 1..20: note = GFR-binding peptide
  VARIANT 6..7: note = Xaa is C or S
AVPKAXXTPTKLSPINMLYF

SEQ ID NO: 264 - protein, 20 aa, synthetic construct
  REGION 1..20: note = GFR-binding peptide
  VARIANT 6..7: note = Xaa is C or S
KVGKAXXTPTKLSPINMLYF

SEQ ID NO: 265 - protein, 20 aa, synthetic construct
  REGION 1..20: note = GFR-binding peptide
  VARIANT 6..7: note = Xaa is C or S
KASKAXXTPTKLSPINMLYF

SEQ ID NO: 266 - protein, 20 aa, synthetic construct
  REGION 1..20: note = GFR-binding peptide
  VARIANT 6..7: note = Xaa is C or S
AAPASXXTPTRLSPINMLYF

SEQ ID NO: 267 - protein, 20 aa, synthetic construct
  REGION 1..20: note = GFR-binding peptide
  VARIANT 6..7: note = Xaa is C or S
STPPTXXTPTRLSPINMLYF

SEQ ID NO: 268 - protein, 20 aa, synthetic construct
  REGION 1..20: note = GFR-binding peptide
  VARIANT 6..7: note = Xaa is C or S
HVPKPXXTPTKLSPINMLYF

SEQ ID NO: 269 - protein, 20 aa, synthetic construct
  REGION 1..20: note = GFR-binding peptide
  VARIANT 6..7: note = Xaa is C or S
RVPSTXXTPTKTSPINMLYF

SEQ ID NO: 270 - protein, 20 aa, synthetic construct
  REGION 1..20: note = GFR-binding peptide
  VARIANT 6..7: note = Xaa is C or S
ASAAPXXTPTALSPINMLYF

SEQ ID NO: 271 - protein, 20 aa, synthetic construct
  REGION 1..20: note = GFR-binding peptide
  VARIANT 6..7: note = Xaa is C or S
ASASPXXTPTDLSPINMLYF

SEQ ID NO: 272 - protein, 20 aa, synthetic construct
  REGION 1..20: note = GFR-binding peptide
  VARIANT 6..7: note = Xaa is C or S
ASASPXXTPTDLSPINMLYF

SEQ ID NO: 273 - protein, 20 aa, synthetic construct
  REGION 1..20: note = GFR-binding peptide
  VARIANT 6..7: note = Xaa is C or S
KIPKAXXVPTELSPINMLYF

SEQ ID NO: 274 - protein, 20 aa, synthetic construct
  REGION 1..20: note = GFR-binding peptide
  VARIANT 6..7: note = Xaa is C or S
GIPEPXXVPEKMSPINMLYF

SEQ ID NO: 275 - protein, 20 aa, synthetic construct
  REGION 1..20: note = GFR-binding peptide
  VARIANT 6..7: note = Xaa is C or S
SIPKAXXVPTELSPINMLYF

SEQ ID NO: 276 - protein, 20 aa, synthetic construct
  REGION 1..20: note = GFR-binding peptide
  VARIANT 7: note = Xaa is C or S
HVTKPTXAPTKLSPINMLYF

SEQ ID NO: 277 - protein, 20 aa, synthetic construct
  REGION 1..20: note = GFR-binding peptide
  VARIANT 6..7: note = Xaa is C or S
YVPKPXXAPTKLSPINMLYF

SEQ ID NO: 278 - protein, 20 aa, synthetic construct
  REGION 1..20: note = GFR-binding peptide
  VARIANT 6..7: note = Xaa is C or S
TVPKPXXAPTQLSPINMLYF

SEQ ID NO: 279 - protein, 20 aa, synthetic construct
  REGION 1..20: note = GFR-binding peptide
  VARIANT 6..7: note = Xaa is C or S
AVPKAXXAPTKLSPINMLYF

SEQ ID NO: 280 - protein, 20 aa, synthetic construct
  REGION 1..20: note = GFR-binding peptide
  VARIANT 6..7: note = Xaa is C or S
KVGKAXXVPTKLSPINMLYF

SEQ ID NO: 281 - protein, 20 aa, synthetic construct
  REGION 1..20: note = GFR-binding peptide
  VARIANT 6..7: note = Xaa is C or S
KASKAXXVPTKLSPINMLYF

SEQ ID NO: 282 - protein, 20 aa, synthetic construct
  REGION 1..20: note = GFR-binding peptide
  VARIANT 6..7: note = Xaa is C or S
AAPASXXVPARLSPINMLYF

SEQ ID NO: 283 - protein, 20 aa, synthetic construct
  REGION 1..20: note = GFR-binding peptide
  VARIANT 6..7: note = Xaa is C or S
STPPTXXVPTRLSPINMLYF

SEQ ID NO: 284 - protein, 20 aa, synthetic construct
  REGION 1..20: note = GFR-binding peptide
  VARIANT 6..7: note = Xaa is C or S
HVPKPXXAPTKLSPINMLYF

SEQ ID NO: 285 - protein, 20 aa, synthetic construct
  REGION 1..20: note = GFR-binding peptide
  VARIANT 6..7: note = Xaa is C or S
RVPSTXXAPVKTSPINMLYF

SEQ ID NO: 286 - protein, 20 aa, synthetic construct
  REGION 1..20: note = GFR-binding peptide
  VARIANT 6..7: note = Xaa is C or S
ASAAPXXVPQALSPINMLYF

SEQ ID NO: 287 - protein, 20 aa, synthetic construct
  REGION 1..20: note = GFR-binding peptide
  VARIANT 6..7: note = Xaa is C or S
ASASPXXVSQDLSPINMLYF

SEQ ID NO: 288 - protein, 20 aa, synthetic construct
  REGION 1..20: note = GFR-binding peptide
  VARIANT 6..7: note = Xaa is C or S
ASASPXXVPQDLSPINMLYF

SEQ ID NO: 289 - protein, 20 aa, synthetic construct
  REGION 1..20: note = GFR-binding peptide
  VARIANT 7: note = Xaa is C or S
NDEGLEXVPTEESPINMLYF

SEQ ID NO: 290 - protein, 20 aa, synthetic construct
  REGION 1..20: note = GFR-binding peptide
  VARIANT 7: note = Xaa is C or S
NDEGLEXVPTGQSPINMLYF

SEQ ID NO: 291 - protein, 20 aa, synthetic construct
  REGION 1..20: note = GFR-binding peptide
  VARIANT 5: note = Xaa is C or S
SSVKXQPSRVHHSPINMLYF

SEQ ID NO: 292 - protein, 20 aa, synthetic construct
  REGION 1..20: note = GFR-binding peptide
  VARIANT 5: note = Xaa is C or S
RNVQXRPTQVQLSPINMLYF

SEQ ID NO: 293 - protein, 20 aa, synthetic construct
  REGION 1..20: note = GFR-binding peptide
  VARIANT 6..7: note = Xaa is C or S
KIPKAXXVPAELSPISILYI

SEQ ID NO: 294 - protein, 20 aa, synthetic construct
  REGION 1..20: note = GFR-binding peptide
  VARIANT 6..7: note = Xaa is C or S
SIPKAXXVPAELSPISILYI

SEQ ID NO: 295 - protein, 20 aa, synthetic construct
  REGION 1..20: note = GFR-binding peptide
  VARIANT 7: note = Xaa is C or S
HVTKPTXVPAKLSPISILYI

SEQ ID NO: 296 - protein, 20 aa, synthetic construct
  REGION 1..20: note = GFR-binding peptide
  VARIANT 6..7: note = Xaa is C or S
YVPKPXXVPAKLSPISILYI

SEQ ID NO: 297 - protein, 20 aa, synthetic construct
  REGION 1..20: note = GFR-binding peptide
  VARIANT 6..7: note = Xaa is C or S
TVPKPXXVPAQLSPISILYI

SEQ ID NO: 298 - protein, 20 aa, synthetic construct
  REGION 1..20: note = GFR-binding peptide
  VARIANT 6..7: note = Xaa is C or S
AVPKAXXVPAKLSPISILYI

SEQ ID NO: 299 - protein, 20 aa, synthetic construct
  REGION 1..20: note = GFR-binding peptide
  VARIANT 6..7: note = Xaa is C or S
KVGKAXXVPAKLSPISILYI

SEQ ID NO: 300 - protein, 20 aa, synthetic construct
  REGION 1..20: note = GFR-binding peptide
  VARIANT 6..7: note = Xaa is C or S
KASKAXXVPAKLSPISILYI

SEQ ID NO: 301 - protein, 20 aa, synthetic construct
  REGION 1..20: note = GFR-binding peptide
  VARIANT 6..7: note = Xaa is C or S
GSAGPXXVPAKMSPISILYI

SEQ ID NO: 302 - protein, 20 aa, synthetic construct
  REGION 1..20: note = GFR-binding peptide
  VARIANT 6..7: note = Xaa is C or S
STPPTXXVPARLSPISILYI

SEQ ID NO: 303 - protein, 20 aa, synthetic construct
  REGION 1..20: note = GFR-binding peptide
  VARIANT 6..7: note = Xaa is C or S
HVPKPXXVPAKLSPISILYI

SEQ ID NO: 304 - protein, 20 aa, synthetic construct
  REGION 1..20: note = GFR-binding peptide
  VARIANT 6..7: note = Xaa is C or S
ASASPXXVPADLSPISILYI

SEQ ID NO: 305 - protein, 20 aa, synthetic construct
  REGION 1..20: note = GFR-binding peptide
  VARIANT 6..7: note = Xaa is C or S
ASASPXXVPADLSPISILYI

SEQ ID NO: 306 - protein, 20 aa, synthetic construct
  REGION 1..20: note = GFR-binding peptide
  VARIANT 6..7: note = Xaa is C or S
KIPKAXXVPTELSPISILYI

SEQ ID NO: 307 - protein, 20 aa, synthetic construct
  REGION 1..20: note = GFR-binding peptide
  VARIANT 6..7: note = Xaa is C or S
GIPEPXXVPEKMSPISILYI

SEQ ID NO: 308 - protein, 20 aa, synthetic construct
  REGION 1..20: note = GFR-binding peptide
  VARIANT 6..7: note = Xaa is C or S
SIPKAXXVPTELSPISILYI

SEQ ID NO: 309 - protein, 20 aa, synthetic construct
  REGION 1..20: note = GFR-binding peptide
  VARIANT 7: note = Xaa is C or S
HVTKPTXAPTKLSPISILYI

SEQ ID NO: 310 - protein, 20 aa, synthetic construct
  REGION 1..20: note = GFR-binding peptide
  VARIANT 6..7: note = Xaa is C or S
YVPKPXXAPTKLSPISILYI

SEQ ID NO: 311 - protein, 20 aa, synthetic construct
  REGION 1..20: note = GFR-binding peptide
  VARIANT 6..7: note = Xaa is C or S
TVPKPXXAPTQLSPISILYI

SEQ ID NO: 312 - protein, 20 aa, synthetic construct
  REGION 1..20: note = GFR-binding peptide
  VARIANT 6..7: note = Xaa is C or S
AVPKAXXAPTKLSPISILYI

SEQ ID NO: 313 - protein, 20 aa, synthetic construct
  REGION 1..20: note = GFR-binding peptide
  VARIANT 6..7: note = Xaa is C or S
KVGKAXXVPTKLSPISILYI

SEQ ID NO: 314 - protein, 20 aa, synthetic construct
  REGION 1..20: note = GFR-binding peptide
  VARIANT 6..7: note = Xaa is C or S
KASKAXXVPTKLSPISILYI

SEQ ID NO: 315 - protein, 20 aa, synthetic construct
  REGION 1..20: note = GFR-binding peptide
  VARIANT 6..7: note = Xaa is C or S
GSAGPXXTPTKMSPISILYI

SEQ ID NO: 316 - protein, 20 aa, synthetic construct
  REGION 1..20: note = GFR-binding peptide
  VARIANT 6..7: note = Xaa is C or S
STPPTXXVPTRLSPISILYI

SEQ ID NO: 317 - protein, 20 aa, synthetic construct
  REGION 1..20: note = GFR-binding peptide
  VARIANT 6..7: note = Xaa is C or S
HVPKPXXAPTKLSPISILYI

SEQ ID NO: 318 - protein, 20 aa, synthetic construct
  REGION 1..20: note = GFR-binding peptide
  VARIANT 6..7: note = Xaa is C or S
RVPSTXXAPVKTSPISILYI

SEQ ID NO: 319 - protein, 20 aa, synthetic construct
  REGION 1..20: note = GFR-binding peptide
  VARIANT 6..7: note = Xaa is C or S
ASAAPXXVPQALSPISILYI

SEQ ID NO: 320 - protein, 20 aa, synthetic construct
  REGION 1..20: note = GFR-binding peptide
  VARIANT 6..7: note = Xaa is C or S
ASASPXXVSQDLSPISILYI

SEQ ID NO: 321 - protein, 20 aa, synthetic construct
  REGION 1..20: note = GFR-binding peptide
  VARIANT 6..7: note = Xaa is C or S
ASASPXXVPQDLSPISILYI

SEQ ID NO: 322 - protein, 20 aa, synthetic construct
  REGION 1..20: note = GFR-binding peptide
  VARIANT 7: note = Xaa is C or S
NDEGLEXVPTGQSPISILYI

SEQ ID NO: 323 - protein, 20 aa, synthetic construct
  REGION 1..20: note = GFR-binding peptide
  VARIANT 5: note = Xaa is C or S
SSVKXQPSRVHHSPISILYI

SEQ ID NO: 324 - protein, 20 aa, synthetic construct
  REGION 1..20: note = GFR-binding peptide
  VARIANT 5: note = Xaa is C or S
RNVQXRPTQVQLSPISILYI

SEQ ID NO: 325 - protein, 20 aa, synthetic construct
  REGION 1..20: note = GFR-binding peptide
  VARIANT 6..7: note = Xaa is C or S
KIPKAXXVPTELSPISILFI

SEQ ID NO: 326 - protein, 20 aa, synthetic construct
  REGION 1..20: note = GFR-binding peptide
  VARIANT 6..7: note = Xaa is C or S
GIPEPXXVPTKMSPISILFI

SEQ ID NO: 327 - protein, 20 aa, synthetic construct
  REGION 1..20: note = GFR-binding peptide
  VARIANT 6..7: note = Xaa is C or S
SIPKAXXVPTELSPISILFI

SEQ ID NO: 328 - protein, 20 aa, synthetic construct
  REGION 1..20: note = GFR-binding peptide
  VARIANT 7: note = Xaa is C or S
HVTKPTXVPTKLSPISILFI

SEQ ID NO: 329 - protein, 20 aa, synthetic construct
  REGION 1..20: note = GFR-binding peptide
  VARIANT 6..7: note = Xaa is C or S
YVPKPXXVPTKLSPISILFI

SEQ ID NO: 330 - protein, 20 aa, synthetic construct
  REGION 1..20: note = GFR-binding peptide
  VARIANT 6..7: note = Xaa is C or S
TVPKPXXVPTQLSPISILFI

SEQ ID NO: 331 - protein, 20 aa, synthetic construct
  REGION 1..20: note = GFR-binding peptide
  VARIANT 6..7: note = Xaa is C or S
AVPKAXXVPTKLSPISILFI

SEQ ID NO: 332 - protein, 20 aa, synthetic construct
  REGION 1..20: note = GFR-binding peptide
  VARIANT 6..7: note = Xaa is C or S
KVGKAXXVPTKLSPISILFI

SEQ ID NO: 333 - protein, 20 aa, synthetic construct
  REGION 1..20: note = GFR-binding peptide
  VARIANT 6..7: note = Xaa is C or S
KASKAXXVPTKLSPISILFI

SEQ ID NO: 334 - protein, 20 aa, synthetic construct
  REGION 1..20: note = GFR-binding peptide
  VARIANT 6..7: note = Xaa is C or S
GSAGPXXVPTKMSPISILFI

SEQ ID NO: 335 - protein, 20 aa, synthetic construct
  REGION 1..20: note = GFR-binding peptide
  VARIANT 6..7: note = Xaa is C or S
AAPASXXVPTRLSPISILFI

SEQ ID NO: 336 - protein, 20 aa, synthetic construct
  REGION 1..20: note = GFR-binding peptide
  VARIANT 6..7: note = Xaa is C or S
HVPKPXXVPTKLSPISILFI

SEQ ID NO: 337 - protein, 20 aa, synthetic construct
  REGION 1..20: note = GFR-binding peptide
  VARIANT 6..7: note = Xaa is C or S
RVPSTXXVPTKTSPISILFI

SEQ ID NO: 338 - protein, 20 aa, synthetic construct
  REGION 1..20: note = GFR-binding peptide
  VARIANT 6..7: note = Xaa is C or S
ASAAPXXVPTALSPISILFI

SEQ ID NO: 339 - protein, 20 aa, synthetic construct
  REGION 1..20: note = GFR-binding peptide
  VARIANT 6..7: note = Xaa is C or S
ASASPXXVPTDLSPISILFI

SEQ ID NO: 340 - protein, 20 aa, synthetic construct
  REGION 1..20: note = GFR-binding peptide
  VARIANT 6..7: note = Xaa is C or S
ASASPXXVPTDLSPISILFI

SEQ ID NO: 341 - protein, 20 aa, synthetic construct
  REGION 1..20: note = GFR-binding peptide
  VARIANT 6..7: note = Xaa is C or S
GIPEPXXVPEKMSPISILFI

SEQ ID NO: 342 - protein, 20 aa, synthetic construct
  REGION 1..20: note = GFR-binding peptide
  VARIANT 7: note = Xaa is C or S
HVTKPTXAPTKLSPISILFI

SEQ ID NO: 343 - protein, 20 aa, synthetic construct
  REGION 1..20: note = GFR-binding peptide
  VARIANT 6..7: note = Xaa is C or S
YVPKPXXAPTKLSPISILFI

SEQ ID NO: 344 - protein, 20 aa, synthetic construct
  REGION 1..20: note = GFR-binding peptide
  VARIANT 6..7: note = Xaa is C or S
TVPKPXXAPTQLSPISILFI

SEQ ID NO: 345 - protein, 20 aa, synthetic construct
  REGION 1..20: note = GFR-binding peptide
  VARIANT 6..7: note = Xaa is C or S
AVPKAXXAPTKLSPISILFI

SEQ ID NO: 346 - protein, 20 aa, synthetic construct
  REGION 1..20: note = GFR-binding peptide
  VARIANT 6..7: note = Xaa is C or S
GSAGPXXTPTKMSPISILFI

SEQ ID NO: 347 - protein, 20 aa, synthetic construct
  REGION 1..20: note = GFR-binding peptide
  VARIANT 6..7: note = Xaa is C or S
AAPASXXVPARLSPISILFI

SEQ ID NO: 348 - protein, 20 aa, synthetic construct
  REGION 1..20: note = GFR-binding peptide
  VARIANT 6..7: note = Xaa is C or S
HVPKPXXAPTKLSPISILFI

SEQ ID NO: 349 - protein, 20 aa, synthetic construct
  REGION 1..20: note = GFR-binding peptide
  VARIANT 6..7: note = Xaa is C or S
RVPSTXXAPVKTSPISILFI

SEQ ID NO: 350 - protein, 20 aa, synthetic construct
  REGION 1..20: note = GFR-binding peptide
  VARIANT 6..7: note = Xaa is C or S
ASAAPXXVPQALSPISILFI

SEQ ID NO: 351 - protein, 20 aa, synthetic construct
  REGION 1..20: note = GFR-binding peptide
  VARIANT 6..7: note = Xaa is C or S
ASASPXXVSQDLSPISILFI

SEQ ID NO: 352 - protein, 20 aa, synthetic construct
  REGION 1..20: note = GFR-binding peptide
  VARIANT 6..7: note = Xaa is C or S
ASASPXXVPQDLSPISILFI

SEQ ID NO: 353 - protein, 20 aa, synthetic construct
  REGION 1..20: note = GFR-binding peptide
  VARIANT 6..7: note = Xaa is C or S
KIPKAXXAPVELKPLSMLYV

SEQ ID NO: 354 - protein, 20 aa, synthetic construct
  REGION 1..20: note = GFR-binding peptide
  VARIANT 6..7: note = Xaa is C or S
GIPEPXXAPVKMKPLSMLYV

SEQ ID NO: 355 - protein, 20 aa, synthetic construct
  REGION 1..20: note = GFR-binding peptide
  VARIANT 6..7: note = Xaa is C or S
SIPKAXXAPVELKPLSMLYV

SEQ ID NO: 356 - protein, 20 aa, synthetic construct
  REGION 1..20: note = GFR-binding peptide
  VARIANT 7: note = Xaa is C or S
HVTKPTXAPVKLKPLSMLYV

SEQ ID NO: 357 - protein, 20 aa, synthetic construct
  REGION 1..20: note = GFR-binding peptide
  VARIANT 6..7: note = Xaa is C or S
YVPKPXXAPVKLKPLSMLYV

SEQ ID NO: 358 - protein, 20 aa, synthetic construct
  REGION 1..20: note = GFR-binding peptide
  VARIANT 6..7: note = Xaa is C or S
TVPKPXXAPVQLKPLSMLYV

SEQ ID NO: 359 - protein, 20 aa, synthetic construct
  REGION 1..20: note = GFR-binding peptide
  VARIANT 6..7: note = Xaa is C or S
AVPKAXXAPVKLKPLSMLYV

SEQ ID NO: 360 - protein, 20 aa, synthetic construct
  REGION 1..20: note = GFR-binding peptide
  VARIANT 6..7: note = Xaa is C or S
KVGKAXXAPVKLKPLSMLYV

SEQ ID NO: 361 - protein, 20 aa, synthetic construct
  REGION 1..20: note = GFR-binding peptide
  VARIANT 6..7: note = Xaa is C or S
KASKAXXAPVKLKPLSMLYV

SEQ ID NO: 362 - protein, 20 aa, synthetic construct
  REGION 1..20: note = GFR-binding peptide
  VARIANT 6..7: note = Xaa is C or S
GSAGPXXAPVKMKPLSMLYV

SEQ ID NO: 363 - protein, 20 aa, synthetic construct
  REGION 1..20: note = GFR-binding peptide
  VARIANT 6..7: note = Xaa is C or S
AAPASXXAPVRLKPLSMLYV

SEQ ID NO: 364 - protein, 20 aa, synthetic construct
  REGION 1..20: note = GFR-binding peptide
  VARIANT 6..7: note = Xaa is C or S
STPPTXXAPVRLKPLSMLYV

SEQ ID NO: 365 - protein, 20 aa, synthetic construct
  REGION 1..20: note = GFR-binding peptide
  VARIANT 6..7: note = Xaa is C or S
HVPKPXXAPVKLKPLSMLYV

SEQ ID NO: 366 - protein, 20 aa, synthetic construct
  REGION 1..20: note = GFR-binding peptide
  VARIANT 6..7: note = Xaa is C or S
ASAAPXXAPVALKPLSMLYV

SEQ ID NO: 367 - protein, 20 aa, synthetic construct
  REGION 1..20: note = GFR-binding peptide
  VARIANT 6..7: note = Xaa is C or S
ASASPXXAPVDLKPLSMLYV

SEQ ID NO: 368 - protein, 20 aa, synthetic construct
  REGION 1..20: note = GFR-binding peptide
  VARIANT 6..7: note = Xaa is C or S
ASASPXXAPVDLKPLSMLYV

SEQ ID NO: 369 - protein, 20 aa, synthetic construct
  REGION 1..20: note = GFR-binding peptide
  VARIANT 6..7: note = Xaa is C or S
KIPKAXXVPTELKPLSMLYV

SEQ ID NO: 370 - protein, 20 aa, synthetic construct
  REGION 1..20: note = GFR-binding peptide
  VARIANT 6..7: note = Xaa is C or S
GIPEPXXVPEKMKPLSMLYV

SEQ ID NO: 371 - protein, 20 aa, synthetic construct
  REGION 1..20: note = GFR-binding peptide
  VARIANT 6..7: note = Xaa is C or S
SIPKAXXVPTELKPLSMLYV

SEQ ID NO: 372 - protein, 20 aa, synthetic construct
  REGION 1..20: note = GFR-binding peptide
  VARIANT 7: note = Xaa is C or S
HVTKPTXAPTKLKPLSMLYV

SEQ ID NO: 373 - protein, 20 aa, synthetic construct
  REGION 1..20: note = GFR-binding peptide
  VARIANT 6..7: note = Xaa is C or S
YVPKPXXAPTKLKPLSMLYV

SEQ ID NO: 374 - protein, 20 aa, synthetic construct
  REGION 1..20: note = GFR-binding peptide
  VARIANT 6..7: note = Xaa is C or S
TVPKPXXAPTQLKPLSMLYV

SEQ ID NO: 375 - protein, 20 aa, synthetic construct
  REGION 1..20: note = GFR-binding peptide
  VARIANT 6..7: note = Xaa is C or S
AVPKAXXAPTKLKPLSMLYV

SEQ ID NO: 376 - protein, 20 aa, synthetic construct
  REGION 1..20: note = GFR-binding peptide
  VARIANT 6..7: note = Xaa is C or S
KVGKAXXVPTKLKPLSMLYV

SEQ ID NO: 377 - protein, 20 aa, synthetic construct
  REGION 1..20: note = GFR-binding peptide
  VARIANT 6..7: note = Xaa is C or S
KASKAXXVPTKLKPLSMLYV

SEQ ID NO: 378 - protein, 20 aa, synthetic construct
  REGION 1..20: note = GFR-binding peptide
  VARIANT 6..7: note = Xaa is C or S
GSAGPXXTPTKMKPLSMLYV

SEQ ID NO: 379 - protein, 20 aa, synthetic construct
  REGION 1..20: note = GFR-binding peptide
  VARIANT 6..7: note = Xaa is C or S
AAPASXXVPARLKPLSMLYV

SEQ ID NO: 380 - protein, 20 aa, synthetic construct
  REGION 1..20: note = GFR-binding peptide
  VARIANT 6..7: note = Xaa is C or S
STPPTXXVPTRLKPLSMLYV

SEQ ID NO: 381 - protein, 20 aa, synthetic construct
  REGION 1..20: note = GFR-binding peptide
  VARIANT 6..7: note = Xaa is C or S
HVPKPXXAPTKLKPLSMLYV

SEQ ID NO: 382 - protein, 20 aa, synthetic construct
  REGION 1..20: note = GFR-binding peptide
  VARIANT 6..7: note = Xaa is C or S
ASAAPXXVPQALKPLSMLYV

SEQ ID NO: 383 - protein, 20 aa, synthetic construct
  REGION 1..20: note = GFR-binding peptide
  VARIANT 6..7: note = Xaa is C or S
ASASPXXVSQDLKPLSMLYV

SEQ ID NO: 384 - protein, 20 aa, synthetic construct
  REGION 1..20: note = GFR-binding peptide
  VARIANT 6..7: note = Xaa is C or S
ASASPXXVPQDLKPLSMLYV

SEQ ID NO: 385 - protein, 20 aa, synthetic construct
  REGION 1..20: note = GFR-binding peptide
  VARIANT 7: note = Xaa is C or S
NDEGLEXVPTEEKPLSMLYV

SEQ ID NO: 386 - protein, 20 aa, synthetic construct
  REGION 1..20: note = GFR-binding peptide
  VARIANT 7: note = Xaa is C or S
NDEGLEXVPTGQKPLSMLYV

SEQ ID NO: 387 - protein, 20 aa, synthetic construct
  REGION 1..20: note = GFR-binding peptide
  VARIANT 7: note = Xaa is C or S
HVTKPTXVPQKLEPLPIVYY

SEQ ID NO: 388 - protein, 20 aa, synthetic construct
  REGION 1..20: note = GFR-binding peptide
  VARIANT 6..7: note = Xaa is C or S
YVPKPXXVPQKLEPLPIVYY

SEQ ID NO: 389 - protein, 20 aa, synthetic construct
  REGION 1..20: note = GFR-binding peptide
  VARIANT 6..7: note = Xaa is C or S
TVPKPXXVPQQLEPLPIVYY

SEQ ID NO: 390 - protein, 20 aa, synthetic construct
  REGION 1..20: note = GFR-binding peptide
  VARIANT 6..7: note = Xaa is C or S
AVPKAXXVPQKLEPLPIVYY

SEQ ID NO: 391 - protein, 20 aa, synthetic construct
  REGION 1..20: note = GFR-binding peptide
  VARIANT 6..7: note = Xaa is C or S
GSAGPXXVPQKMEPLPIVYY

SEQ ID NO: 392 - protein, 20 aa, synthetic construct
  REGION 1..20: note = GFR-binding peptide
  VARIANT 6..7: note = Xaa is C or S
AAPASXXVPQRLEPLPIVYY

SEQ ID NO: 393 - protein, 20 aa, synthetic construct
  REGION 1..20: note = GFR-binding peptide
  VARIANT 6..7: note = Xaa is C or S
STPPTXXVPQRLEPLPIVYY

SEQ ID NO: 394 - protein, 20 aa, synthetic construct
  REGION 1..20: note = GFR-binding peptide
  VARIANT 6..7: note = Xaa is C or S
HVPKPXXVPQKLEPLPIVYY

SEQ ID NO: 395 - protein, 20 aa, synthetic construct
  REGION 1..20: note = GFR-binding peptide
  VARIANT 6..7: note = Xaa is C or S
RVPSTXXVPQKTEPLPIVYY

SEQ ID NO: 396 - protein, 20 aa, synthetic construct
  REGION 1..20: note = GFR-binding peptide
  VARIANT 6..7: note = Xaa is C or S
ASASPXXVPQDLEPLPIVYY

SEQ ID NO: 397 - protein, 20 aa, synthetic construct
  REGION 1..20: note = GFR-binding peptide
  VARIANT 6..7: note = Xaa is C or S
ASASPXXVPQDLEPLPIVYY

SEQ ID NO: 398 - protein, 20 aa, synthetic construct
  REGION 1..20: note = GFR-binding peptide
  VARIANT 6..7: note = Xaa is C or S
KIPKAXXVPTELEPLPIVYY

SEQ ID NO: 399 - protein, 20 aa, synthetic construct
  REGION 1..20: note = GFR-binding peptide
  VARIANT 6..7: note = Xaa is C or S
GIPEPXXVPEKMEPLPIVYY

SEQ ID NO: 400 - protein, 20 aa, synthetic construct
  REGION 1..20: note = GFR-binding peptide
  VARIANT 6..7: note = Xaa is C or S
SIPKAXXVPTELEPLPIVYY

SEQ ID NO: 401 - protein, 20 aa, synthetic construct
  REGION 1..20: note = GFR-binding peptide
  VARIANT 7: note = Xaa is C or S
HVTKPTXAPTKLEPLPIVYY

SEQ ID NO: 402 - protein, 20 aa, synthetic construct
  REGION 1..20: note = GFR-binding peptide
  VARIANT 6..7: note = Xaa is C or S
YVPKPXXAPTKLEPLPIVYY

SEQ ID NO: 403 - protein, 20 aa, synthetic construct
  REGION 1..20: note = GFR-binding peptide
  VARIANT 6..7: note = Xaa is C or S
TVPKPXXAPTQLEPLPIVYY

SEQ ID NO: 404 - protein, 20 aa, synthetic construct
  REGION 1..20: note = GFR-binding peptide
  VARIANT 6..7: note = Xaa is C or S
KVGKAXXVPTKLEPLPIVYY

SEQ ID NO: 405 - protein, 20 aa, synthetic construct
  REGION 1..20: note = GFR-binding peptide
  VARIANT 6..7: note = Xaa is C or S
KASKAXXVPTKLEPLPIVYY

SEQ ID NO: 406 - protein, 20 aa, synthetic construct
  REGION 1..20: note = GFR-binding peptide
  VARIANT 6..7: note = Xaa is C or S
GSAGPXXTPTKMEPLPIVYY

SEQ ID NO: 407 - protein, 20 aa, synthetic construct
  REGION 1..20: note = GFR-binding peptide
  VARIANT 6..7: note = Xaa is C or S
AAPASXXVPARLEPLPIVYY

SEQ ID NO: 408 - protein, 20 aa, synthetic construct
  REGION 1..20: note = GFR-binding peptide
  VARIANT 6..7: note = Xaa is C or S
STPPTXXVPTRLEPLPIVYY

SEQ ID NO: 409 - protein, 20 aa, synthetic construct
  REGION 1..20: note = GFR-binding peptide
  VARIANT 6..7: note = Xaa is C or S
HVPKPXXAPTKLEPLPIVYY

SEQ ID NO: 410 - protein, 20 aa, synthetic construct
  REGION 1..20: note = GFR-binding peptide
  VARIANT 6..7: note = Xaa is C or S
RVPSTXXAPVKTEPLPIVYY

SEQ ID NO: 411 - protein, 20 aa, synthetic construct
  REGION 1..20: note = GFR-binding peptide
  VARIANT 6..7: note = Xaa is C or S
ASASPXXVSQDLEPLPIVYY

SEQ ID NO: 412 - protein, 20 aa, synthetic construct
  REGION 1..20: note = GFR-binding peptide
  VARIANT 7: note = Xaa is C or S
NDEGLEXVPTEEEPLPIVYY

SEQ ID NO: 413 - protein, 20 aa, synthetic construct
  REGION 1..20: note = GFR-binding peptide
  VARIANT 7: note = Xaa is C or S
NDEGLEXVPTGQEPLPIVYY

SEQ ID NO: 414 - protein, 20 aa, synthetic construct
  REGION 1..20: note = GFR-binding peptide
  VARIANT 5: note = Xaa is C or S
SSVKXQPSRVHHEPLPIVYY

SEQ ID NO: 415 - protein, 20 aa, synthetic construct
  REGION 1..20: note = GFR-binding peptide
  VARIANT 5: note = Xaa is C or S
RNVQXRPTQVQLEPLPIVYY

SEQ ID NO: 416 - protein, 20 aa, synthetic construct
  REGION 1..20: note = GFR-binding peptide
  VARIANT 6..7: note = Xaa is C or S
GIPEPXXVSQKMEPLTILYY

SEQ ID NO: 417 - protein, 20 aa, synthetic construct
  REGION 1..20: note = GFR-binding peptide
  VARIANT 6..7: note = Xaa is C or S
SIPKAXXVSQELEPLTILYY

SEQ ID NO: 418 - protein, 20 aa, synthetic construct
  REGION 1..20: note = GFR-binding peptide
  VARIANT 7: note = Xaa is C or S
HVTKPTXVSQKLEPLTILYY

SEQ ID NO: 419 - protein, 20 aa, synthetic construct
  REGION 1..20: note = GFR-binding peptide
  VARIANT 6..7: note = Xaa is C or S
YVPKPXXVSQKLEPLTILYY

SEQ ID NO: 420 - protein, 20 aa, synthetic construct
  REGION 1..20: note = GFR-binding peptide
  VARIANT 6..7: note = Xaa is C or S
TVPKPXXVSQQLEPLTILYY

SEQ ID NO: 421 - protein, 20 aa, synthetic construct
  REGION 1..20: note = GFR-binding peptide
  VARIANT 6..7: note = Xaa is C or S
AVPKAXXVSQKLEPLTILYY

SEQ ID NO: 422 - protein, 20 aa, synthetic construct
  REGION 1..20: note = GFR-binding peptide
  VARIANT 6..7: note = Xaa is C or S
KASKAXXVSQKLEPLTILYY

SEQ ID NO: 423 - protein, 20 aa, synthetic construct
  REGION 1..20: note = GFR-binding peptide
  VARIANT 6..7: note = Xaa is C or S
GSAGPXXVSQKMEPLTILYY

SEQ ID NO: 424 - protein, 20 aa, synthetic construct
  REGION 1..20: note = GFR-binding peptide
  VARIANT 6..7: note = Xaa is C or S
AAPASXXVSQRLEPLTILYY

SEQ ID NO: 425 - protein, 20 aa, synthetic construct
  REGION 1..20: note = GFR-binding peptide
  VARIANT 6..7: note = Xaa is C or S
STPPTXXVSQRLEPLTILYY

SEQ ID NO: 426 - protein, 20 aa, synthetic construct
  REGION 1..20: note = GFR-binding peptide
  VARIANT 6..7: note = Xaa is C or S
HVPKPXXVSQKLEPLTILYY

SEQ ID NO: 427 - protein, 20 aa, synthetic construct
  REGION 1..20: note = GFR-binding peptide
  VARIANT 6..7: note = Xaa is C or S
RVPSTXXVSQKTEPLTILYY

SEQ ID NO: 428 - protein, 20 aa, synthetic construct
  REGION 1..20: note = GFR-binding peptide
  VARIANT 6..7: note = Xaa is C or S
ASAAPXXVSQALEPLTILYY

SEQ ID NO: 429 - protein, 20 aa, synthetic construct
  REGION 1..20: note = GFR-binding peptide
  VARIANT 6..7: note = Xaa is C or S
KIPKAXXVPTELEPLTILYY

SEQ ID NO: 430 - protein, 20 aa, synthetic construct
  REGION 1..20: note = GFR-binding peptide
  VARIANT 6..7: note = Xaa is C or S
GIPEPXXVPEKMEPLTILYY

SEQ ID NO: 431 - protein, 20 aa, synthetic construct
  REGION 1..20: note = GFR-binding peptide
  VARIANT 6..7: note = Xaa is C or S
SIPKAXXVPTELEPLTILYY

SEQ ID NO: 432 - protein, 20 aa, synthetic construct
  REGION 1..20: note = GFR-binding peptide
  VARIANT 7: note = Xaa is C or S
HVTKPTXAPTKLEPLTILYY

SEQ ID NO: 433 - protein, 20 aa, synthetic construct
  REGION 1..20: note = GFR-binding peptide
  VARIANT 6..7: note = Xaa is C or S
YVPKPXXAPTKLEPLTILYY

SEQ ID NO: 434 - protein, 20 aa, synthetic construct
  REGION 1..20: note = GFR-binding peptide
  VARIANT 6..7: note = Xaa is C or S
TVPKPXXAPTQLEPLTILYY

SEQ ID NO: 435 - protein, 20 aa, synthetic construct
  REGION 1..20: note = GFR-binding peptide
  VARIANT 6..7: note = Xaa is C or S
AVPKAXXAPTKLEPLTILYY

SEQ ID NO: 436 - protein, 20 aa, synthetic construct
  REGION 1..20: note = GFR-binding peptide
  VARIANT 6..7: note = Xaa is C or S
KASKAXXVPTKLEPLTILYY

SEQ ID NO: 437 - protein, 20 aa, synthetic construct
  REGION 1..20: note = GFR-binding peptide
  VARIANT 6..7: note = Xaa is C or S
GSAGPXXTPTKMEPLTILYY

SEQ ID NO: 438 - protein, 20 aa, synthetic construct
  REGION 1..20: note = GFR-binding peptide
  VARIANT 6..7: note = Xaa is C or S
AAPASXXVPARLEPLTILYY

SEQ ID NO: 439 - protein, 20 aa, synthetic construct
  REGION 1..20: note = GFR-binding peptide
  VARIANT 6..7: note = Xaa is C or S
STPPTXXVPTRLEPLTILYY

SEQ ID NO: 440 - protein, 20 aa, synthetic construct
  REGION 1..20: note = GFR-binding peptide
  VARIANT 6..7: note = Xaa is C or S
HVPKPXXAPTKLEPLTILYY

SEQ ID NO: 441 - protein, 20 aa, synthetic construct
  REGION 1..20: note = GFR-binding peptide
  VARIANT 6..7: note = Xaa is C or S
RVPSTXXAPVKTEPLTILYY

SEQ ID NO: 442 - protein, 20 aa, synthetic construct
  REGION 1..20: note = GFR-binding peptide
  VARIANT 7: note = Xaa is C or S
NDEGLEXVPTGQEPLTILYY

SEQ ID NO: 443 - protein, 20 aa, synthetic construct
  REGION 1..20: note = GFR-binding peptide
  VARIANT 5: note = Xaa is C or S
SSVKXQPSRVHHEPLTILYY

SEQ ID NO: 444 - protein, 20 aa, synthetic construct
  REGION 1..20: note = GFR-binding peptide
  VARIANT 5: note = Xaa is C or S
RNVQXRPTQVQLEPLTILYY

SEQ ID NO: 445 - protein, 20 aa, synthetic construct
  REGION 1..20: note = GFR-binding peptide
  VARIANT 6..7: note = Xaa is C or S
KIPKAXXVPQELEPLTILYY

SEQ ID NO: 446 - protein, 20 aa, synthetic construct
  REGION 1..20: note = GFR-binding peptide
  VARIANT 6..7: note = Xaa is C or S
GIPEPXXVPQKMEPLTILYY

SEQ ID NO: 447 - protein, 20 aa, synthetic construct
  REGION 1..20: note = GFR-binding peptide
  VARIANT 6..7: note = Xaa is C or S
SIPKAXXVPQELEPLTILYY

SEQ ID NO: 448 - protein, 20 aa, synthetic construct
  REGION 1..20: note = GFR-binding peptide
  VARIANT 7: note = Xaa is C or S
HVTKPTXVPQKLEPLTILYY

SEQ ID NO: 449 - protein, 20 aa, synthetic construct
  REGION 1..20: note = GFR-binding peptide
  VARIANT 6..7: note = Xaa is C or S
YVPKPXXVPQKLEPLTILYY

SEQ ID NO: 450 - protein, 20 aa, synthetic construct
  REGION 1..20: note = GFR-binding peptide
  VARIANT 6..7: note = Xaa is C or S
TVPKPXXVPQQLEPLTILYY

SEQ ID NO: 451 - protein, 20 aa, synthetic construct
  REGION 1..20: note = GFR-binding peptide
  VARIANT 6..7: note = Xaa is C or S
AVPKAXXVPQKLEPLTILYY

SEQ ID NO: 452 - protein, 20 aa, synthetic construct
  REGION 1..20: note = GFR-binding peptide
  VARIANT 6..7: note = Xaa is C or S
KVGKAXXVPQKLEPLTILYY

SEQ ID NO: 453 - protein, 20 aa, synthetic construct
  REGION 1..20: note = GFR-binding peptide
  VARIANT 6..7: note = Xaa is C or S
KASKAXXVPQKLEPLTILYY

SEQ ID NO: 454 - protein, 20 aa, synthetic construct
  REGION 1..20: note = GFR-binding peptide
  VARIANT 6..7: note = Xaa is C or S
GSAGPXXVPQKMEPLTILYY

SEQ ID NO: 455 - protein, 20 aa, synthetic construct
  REGION 1..20: note = GFR-binding peptide
  VARIANT 6..7: note = Xaa is C or S
AAPASXXVPQRLEPLTILYY

SEQ ID NO: 456 - protein, 20 aa, synthetic construct
  REGION 1..20: note = GFR-binding peptide
  VARIANT 6..7: note = Xaa is C or S
STPPTXXVPQRLEPLTILYY

SEQ ID NO: 457 - protein, 20 aa, synthetic construct
  REGION 1..20: note = GFR-binding peptide
  VARIANT 6..7: note = Xaa is C or S
HVPKPXXVPQKLEPLTILYY

SEQ ID NO: 458 - protein, 20 aa, synthetic construct
  REGION 1..20: note = GFR-binding peptide
  VARIANT 6..7: note = Xaa is C or S
RVPSTXXVPQKTEPLTILYY

SEQ ID NO: 459 - protein, 20 aa, synthetic construct
  REGION 1..20: note = GFR-binding peptide
  VARIANT 6..7: note = Xaa is C or S
ASASPXXVPQDLEPLTILYY

SEQ ID NO: 460 - protein, 20 aa, synthetic construct
  REGION 1..20: note = GFR-binding peptide
  VARIANT 7: note = Xaa is C or S
NDEGLEXVPTGQSNITMQIM

SEQ ID NO: 461 - protein, 20 aa, synthetic construct
  REGION 1..20: note = GFR-binding peptide
  VARIANT 6..7: note = Xaa is C or S
GIPEPXXVPEKMSNITMQIM

SEQ ID NO: 462 - protein, 20 aa, synthetic construct
  REGION 1..20: note = GFR-binding peptide
  VARIANT 7: note = Xaa is C or S
HVTKPTXAPTKLSNITMQIM

SEQ ID NO: 463 - protein, 20 aa, synthetic construct
  REGION 1..20: note = GFR-binding peptide
  VARIANT 6..7: note = Xaa is C or S
YVPKPXXAPTKLSNITMQIM

SEQ ID NO: 464 - protein, 20 aa, synthetic construct
  REGION 1..20: note = GFR-binding peptide
  VARIANT 6..7: note = Xaa is C or S
TVPKPXXAPTQLSNITMQIM

SEQ ID NO: 465 - protein, 20 aa, synthetic construct
  REGION 1..20: note = GFR-binding peptide
  VARIANT 6..7: note = Xaa is C or S
AVPKAXXAPTKLSNITMQIM

SEQ ID NO: 466 - protein, 20 aa, synthetic construct
  REGION 1..20: note = GFR-binding peptide
  VARIANT 6..7: note = Xaa is C or S
HVPKPXXAPTKLSNITMQIM

SEQ ID NO: 467 - protein, 20 aa, synthetic construct
  REGION 1..20: note = GFR-binding peptide
  VARIANT 6..7: note = Xaa is C or S
RVPSTXXAPVKTSNITMQIM

SEQ ID NO: 468 - protein, 20 aa, synthetic construct
  REGION 1..20: note = GFR-binding peptide
  VARIANT 6..7: note = Xaa is C or S
ASAAPXXVPQALSNITMQIM

SEQ ID NO: 469 - protein, 20 aa, synthetic construct
  REGION 1..20: note = GFR-binding peptide
  VARIANT 6..7: note = Xaa is C or S
ASASPXXVSQDLSNITMQIM

SEQ ID NO: 470 - protein, 20 aa, synthetic construct
  REGION 1..20: note = GFR-binding peptide
  VARIANT 6..7: note = Xaa is C or S
ASASPXXVPQDLSNITMQIM

SEQ ID NO: 471 - protein, 20 aa, synthetic construct
  REGION 1..20: note = GFR-binding peptide
  VARIANT 5: note = Xaa is C or S
SSVKXQPSRVHHSNITMQIM

SEQ ID NO: 472 - protein, 20 aa, synthetic construct
  REGION 1..20: note = GFR-binding peptide
  VARIANT 5: note = Xaa is C or S
RNVQXRPTQVQLSNITMQIM

SEQ ID NO: 473 - protein, 20 aa, synthetic construct
  REGION 1..20: note = GFR-binding peptide
  VARIANT 5: note = Xaa is C or S
RNVQXRPSRVQLRSVKVAKV

SEQ ID NO: 474 - protein, 20 aa, synthetic construct
  REGION 1..20: note = GFR-binding peptide
  VARIANT 6..7: note = Xaa is C or S
KIPKAXXVPTELRSVKVAKV

SEQ ID NO: 475 - protein, 20 aa, synthetic construct
  REGION 1..20: note = GFR-binding peptide
  VARIANT 6..7: note = Xaa is C or S
GIPEPXXVPEKMRSVKVAKV

SEQ ID NO: 476 - protein, 20 aa, synthetic construct
  REGION 1..20: note = GFR-binding peptide
  VARIANT 6..7: note = Xaa is C or S
YVPKPXXAPTKLRSVKVAKV

SEQ ID NO: 477 - protein, 20 aa, synthetic construct
  REGION 1..20: note = GFR-binding peptide
  VARIANT 6..7: note = Xaa is C or S
AVPKAXXAPTKLRSVKVAKV

SEQ ID NO: 478 - protein, 20 aa, synthetic construct
  REGION 1..20: note = GFR-binding peptide
  VARIANT 6..7: note = Xaa is C or S
KVGKAXXVPTKLRSVKVAKV

SEQ ID NO: 479 - protein, 20 aa, synthetic construct
  REGION 1..20: note = GFR-binding peptide
  VARIANT 6..7: note = Xaa is C or S
KASKAXXVPTKLRSVKVAKV

SEQ ID NO: 480 - protein, 20 aa, synthetic construct
  REGION 1..20: note = GFR-binding peptide
  VARIANT 6..7: note = Xaa is C or S
GSAGPXXTPTKMRSVKVAKV

SEQ ID NO: 481 - protein, 20 aa, synthetic construct
  REGION 1..20: note = GFR-binding peptide
  VARIANT 6..7: note = Xaa is C or S
AAPASXXVPARLRSVKVAKV

SEQ ID NO: 482 - protein, 20 aa, synthetic construct
  REGION 1..20: note = GFR-binding peptide
  VARIANT 6..7: note = Xaa is C or S
STPPTXXVPTRLRSVKVAKV

SEQ ID NO: 483 - protein, 20 aa, synthetic construct
  REGION 1..20: note = GFR-binding peptide
  VARIANT 6..7: note = Xaa is C or S
HVPKPXXAPTKLRSVKVAKV

SEQ ID NO: 484 - protein, 20 aa, synthetic construct
  REGION 1..20: note = GFR-binding peptide
  VARIANT 6..7: note = Xaa is C or S
RVPSTXXAPVKTRSVKVAKV

SEQ ID NO: 485 - protein, 20 aa, synthetic construct
  REGION 1..20: note = GFR-binding peptide
  VARIANT 6..7: note = Xaa is C or S
ASASPXXVSQDLRSVKVAKV

SEQ ID NO: 486 - protein, 20 aa, synthetic construct
  REGION 1..20: note = GFR-binding peptide
  VARIANT 7: note = Xaa is C or S
NDEGLEXVPTGQRSVKVAKV

SEQ ID NO: 487 - protein, 20 aa, synthetic construct
  REGION 1..20: note = GFR-binding peptide
  VARIANT 5: note = Xaa is C or S
RNVQXRPTQVQLRSVKVAKV

SEQ ID NO: 488 - protein, 20 aa, synthetic construct
  REGION 1..20: note = GFR-binding peptide
  VARIANT 5: note = Xaa is C or S
SSVKXQPTQVHHRPVQVRKI

SEQ ID NO: 489 - protein, 20 aa, synthetic construct
  REGION 1..20: note = GFR-binding peptide
  VARIANT 6..7: note = Xaa is C or S
KIPKAXXVPTELRPVQVRKI

SEQ ID NO: 490 - protein, 20 aa, synthetic construct
  REGION 1..20: note = GFR-binding peptide
  VARIANT 6..7: note = Xaa is C or S
GIPEPXXVPEKMRPVQVRKI

SEQ ID NO: 491 - protein, 20 aa, synthetic construct
  REGION 1..20: note = GFR-binding peptide
  VARIANT 6..7: note = Xaa is C or S
SIPKAXXVPTELRPVQVRKI

SEQ ID NO: 492 - protein, 20 aa, synthetic construct
  REGION 1..20: note = GFR-binding peptide
  VARIANT 7: note = Xaa is C or S
HVTKPTXAPTKLRPVQVRKI

SEQ ID NO: 493 - protein, 20 aa, synthetic construct
  REGION 1..20: note = GFR-binding peptide
  VARIANT 6..7: note = Xaa is C or S
YVPKPXXAPTKLRPVQVRKI

SEQ ID NO: 494 - protein, 20 aa, synthetic construct
  REGION 1..20: note = GFR-binding peptide
  VARIANT 6..7: note = Xaa is C or S
TVPKPXXAPTQLRPVQVRKI

SEQ ID NO: 495 - protein, 20 aa, synthetic construct
  REGION 1..20: note = GFR-binding peptide
  VARIANT 6..7: note = Xaa is C or S
AVPKAXXAPTKLRPVQVRKI

SEQ ID NO: 496 - protein, 20 aa, synthetic construct
  REGION 1..20: note = GFR-binding peptide
  VARIANT 6..7: note = Xaa is C or S
KVGKAXXVPTKLRPVQVRKI

SEQ ID NO: 497 - protein, 20 aa, synthetic construct
  REGION 1..20: note = GFR-binding peptide
  VARIANT 6..7: note = Xaa is C or S
KASKAXXVPTKLRPVQVRKI

SEQ ID NO: 498 - protein, 20 aa, synthetic construct
  REGION 1..20: note = GFR-binding peptide
  VARIANT 6..7: note = Xaa is C or S
GSAGPXXTPTKMRPVQVRKI

SEQ ID NO: 499 - protein, 20 aa, synthetic construct
  REGION 1..20: note = GFR-binding peptide
  VARIANT 6..7: note = Xaa is C or S
AAPASXXVPARLRPVQVRKI

SEQ ID NO: 500 - protein, 20 aa, synthetic construct
  REGION 1..20: note = GFR-binding peptide
  VARIANT 6..7: note = Xaa is C or S
STPPTXXVPTRLRPVQVRKI

SEQ ID NO: 501 - protein, 20 aa, synthetic construct
  REGION 1..20: note = GFR-binding peptide
  VARIANT 6..7: note = Xaa is C or S
HVPKPXXAPTKLRPVQVRKI

SEQ ID NO: 502 - protein, 20 aa, synthetic construct
  REGION 1..20: note = GFR-binding peptide
  VARIANT 6..7: note = Xaa is C or S
RVPSTXXAPVKTRPVQVRKI

SEQ ID NO: 503 - protein, 20 aa, synthetic construct
  REGION 1..20: note = GFR-binding peptide
  VARIANT 6..7: note = Xaa is C or S
ASASPXXVSQDLRPVQVRKI

SEQ ID NO: 504 - protein, 20 aa, synthetic construct
  REGION 1..20: note = GFR-binding peptide
  VARIANT 7: note = Xaa is C or S
NDEGLEXVPTGQRPVQVRKI

SEQ ID NO: 505 - protein, 20 aa, synthetic construct
  REGION 1..20: note = GFR-binding peptide
  VARIANT 5: note = Xaa is C or S
SSVKXQPSRVHHRPVQVRKI

SEQ ID NO: 506 - protein, 8 aa, synthetic construct
  REGION 1..8: note = GFR-binding peptide
SAISILYL

SEQ ID NO: 507 - protein, 8 aa, synthetic construct
  REGION 1..8: note = GFR-binding peptide
SAISVLYL

SEQ ID NO: 508 - protein, 8 aa, synthetic construct
  REGION 1..8: note = GFR-binding peptide
SSLSMLFF

SEQ ID NO: 509 - protein, 8 aa, synthetic construct
  REGION 1..8: note = GFR-binding peptide
SSLSVLFF

SEQ ID NO: 510 - protein, 8 aa, synthetic construct
  REGION 1..8: note = GFR-binding peptide
NAISMLYF

SEQ ID NO: 511 - protein, 8 aa, synthetic construct
  REGION 1..8: note = GFR-binding peptide
NAISILYF

SEQ ID NO: 512 - protein, 8 aa, synthetic construct
  REGION 1..8: note = GFR-binding peptide
SATSMLYY

SEQ ID NO: 513 - protein, 8 aa, synthetic construct
  REGION 1..8: note = GFR-binding peptide
SATSILYY

SEQ ID NO: 514 - protein, 8 aa, synthetic construct
  REGION 1..8: note = GFR-binding peptide
SPISMLYK

SEQ ID NO: 515 - protein, 8 aa, synthetic construct
  REGION 1..8: note = GFR-binding peptide
SPISILYK

SEQ ID NO: 516 - protein, 8 aa, synthetic construct
  REGION 1..8: note = GFR-binding peptide
EPISMLYL

SEQ ID NO: 517 - protein, 8 aa, synthetic construct
  REGION 1..8: note = GFR-binding peptide
EPISVLYL

SEQ ID NO: 518 - protein, 8 aa, synthetic construct
  REGION 1..8: note = GFR-binding peptide
SPINILYF

SEQ ID NO: 519 - protein, 8 aa, synthetic construct
  REGION 1..8: note = GFR-binding peptide
SPINVLYF

SEQ ID NO: 520 - protein, 8 aa, synthetic construct
  REGION 1..8: note = GFR-binding peptide
SPISMLYI

SEQ ID NO: 521 - protein, 8 aa, synthetic construct
  REGION 1..8: note = GFR-binding peptide
SPISVLYI

SEQ ID NO: 522 - protein, 8 aa, synthetic construct
  REGION 1..8: note = GFR-binding peptide
SPISMLFI

SEQ ID NO: 523 - protein, 8 aa, synthetic construct
  REGION 1..8: note = GFR-binding peptide
SPISVLFI

SEQ ID NO: 524 - protein, 8 aa, synthetic construct
  REGION 1..8: note = GFR-binding peptide
KPLSILYV

SEQ ID NO: 525 - protein, 8 aa, synthetic construct
  REGION 1..8: note = GFR-binding peptide
KPLSVLYV

SEQ ID NO: 526 - protein, 8 aa, synthetic construct
  REGION 1..8: note = GFR-binding peptide
EPLPMVYY

SEQ ID NO: 527 - protein, 8 aa, synthetic construct
  REGION 1..8: note = GFR-binding peptide
EPLPVVYY

SEQ ID NO: 528 - protein, 8 aa, synthetic construct
  REGION 1..8: note = GFR-binding peptide
EPLTMLYY

SEQ ID NO: 529 - protein, 8 aa, synthetic construct
  REGION 1..8: note = GFR-binding peptide
EPLTVLYY

SEQ ID NO: 530 - protein, 8 aa, synthetic construct
  REGION 1..8: note = GFR-binding peptide
SNITIQIM

SEQ ID NO: 531 - protein, 8 aa, synthetic construct
  REGION 1..8: note = GFR-binding peptide
SNITVQIM

SEQ ID NO: 532 - protein, 8 aa, synthetic construct
  REGION 1..8: note = GFR-binding peptide
RSVKMAKV

SEQ ID NO: 533 - protein, 8 aa, synthetic construct
  REGION 1..8: note = GFR-binding peptide
RSVKIAKV

SEQ ID NO: 534 - protein, 8 aa, synthetic construct
  REGION 1..8: note = GFR-binding peptide
RPVQMRKI

SEQ ID NO: 535 - protein, 8 aa, synthetic construct
  REGION 1..8: note = GFR-binding peptide
RPVQIRKI

SEQ ID NO: 536 - protein, 20 aa, synthetic construct
  REGION 1..20: note = GFR-binding peptide
  VARIANT 14..15: note = Xaa is C or S
LYLMSIASMKTPVXXPGASG

SEQ ID NO: 537 - protein, 20 aa, synthetic construct
  REGION 1..20: note = GFR-binding peptide
  VARIANT 14..15: note = Xaa is C or S
LYLMSIASLRTPVXXSAPAA

SEQ ID NO: 538 - protein, 20 aa, synthetic construct
  REGION 1..20: note = GFR-binding peptide
  VARIANT 14..15: note = Xaa is C or S
LYLMSIASLRTPVXXTPPTS

SEQ ID NO: 539 - protein, 20 aa, synthetic construct
  REGION 1..20: note = GFR-binding peptide
  VARIANT 14: note = Xaa is C or S
FYLVSIANEETPAXELGEDN

SEQ ID NO: 540 - protein, 20 aa, synthetic construct
  REGION 1..20: note = GFR-binding peptide
  VARIANT 14: note = Xaa is C or S
FYLVSIANQGTPAXELGEDN

SEQ ID NO: 541 - protein, 20 aa, synthetic construct
  REGION 1..20: note = GFR-binding peptide
  VARIANT 14..15: note = Xaa is C or S
YYLVSTASLETPVXXAKPIK

SEQ ID NO: 542 - protein, 20 aa, synthetic construct
  REGION 1..20: note = GFR-binding peptide
  VARIANT 14..15: note = Xaa is C or S
YYLVSTASMKEPVXXPEPIG

SEQ ID NO: 543 - protein, 20 aa, synthetic construct
  REGION 1..20: note = GFR-binding peptide
  VARIANT 14..15: note = Xaa is C or S
KYLVSIPSMKTPVXXPGASG

SEQ ID NO: 544 - protein, 20 aa, synthetic construct
  REGION 1..20: note = GFR-binding peptide
  VARIANT 14: note = Xaa is C or S
FFLISLSSLKEPVXTPKTVH

SEQ ID NO: 545 - protein, 20 aa, synthetic construct
  REGION 1..20: note = GFR-binding peptide
  VARIANT 14..15: note = Xaa is C or S
YYLITLPELKQSVXXAKGVK

SEQ ID NO: 546 - protein, 20 aa, synthetic construct
  REGION 1..20: note = GFR-binding peptide
  VARIANT 16: note = Xaa is C or S
FYLVSIANLQVQTPRXQVNR

SEQ ID NO: 547 - protein, 20 aa, synthetic construct
  REGION 1..20: note = GFR-binding peptide
  VARIANT 14..15: note = Xaa is C or S
LYLMSIASLKTPAXXPKPVH

SEQ ID NO: 548 - protein, 20 aa, synthetic construct
  REGION 1..20: note = GFR-binding peptide
  VARIANT 14..15: note = Xaa is C or S
YYLITLPELKTPVXXAKGVK

SEQ ID NO: 549 - protein, 20 aa, synthetic construct
  REGION 1..20: note = GFR-binding peptide
  VARIANT 16: note = Xaa is C or S
LYLMSIASLQVQTPRXQVNR

SEQ ID NO: 550 - protein, 20 aa, synthetic construct
  REGION 1..20: note = GFR-binding peptide
  VARIANT 14..15: note = Xaa is C or S
LYLMSIASLDQSVXXPSASA

SEQ ID NO: 551 - protein, 20 aa, synthetic construct
  REGION 1..20: note = GFR-binding peptide
  VARIANT 14..15: note = Xaa is C or S
KYLVSIPSLKTPVXXPKPVH

SEQ ID NO: 552 - protein, 20 aa, synthetic construct
  REGION 1..20: note = GFR-binding peptide
  VARIANT 14: note = Xaa is C or S
FYLVSIANQGTPVXELGEDN

SEQ ID NO: 553 - protein, 20 aa, synthetic construct
  REGION 1..20: note = GFR-binding peptide
  VARIANT 14..15: note = Xaa is C or S
LYLMSIASLQTPAXXPKPVT

SEQ ID NO: 554 - protein, 20 aa, synthetic construct
  REGION 1..20: note = GFR-binding peptide
  VARIANT 14..15: note = Xaa is C or S
LYLMSIASLKTPAXXAKPVA

SEQ ID NO: 555 - protein, 20 aa, synthetic construct
  REGION 1..20: note = GFR-binding peptide
  VARIANT 14..15: note = Xaa is C or S
LYLMSIASLKTPVXXAKGVK

SEQ ID NO: 556 - protein, 20 aa, synthetic construct
  REGION 1..20: note = GFR-binding peptide
  VARIANT 14..15: note = Xaa is C or S
LYLMSIASLKTPVXXAKGGG

SEQ ID NO: 557 - protein, 24 aa, synthetic construct
  REGION 1..24: note = GFR-binding peptide
  VARIANT 14..15: note = Xaa is C or S
LYLMSIASMKTPTXXPGASGWFWW

SEQ ID NO: 558 - protein, 25 aa, synthetic construct
  REGION 1..25: note = GFR-binding peptide
  VARIANT 14: note = Xaa is C or S
LYLMSIASLKTPVXTPKTVHPGPTG

SEQ ID NO: 559 - protein, 18 aa, synthetic construct
  REGION 1..18: note = GFR-binding peptide
YYLITLPELEQPVPGPTG

SEQ ID NO: 560 - protein, 18 aa, synthetic construct
  REGION 1..18: note = GFR-binding peptide
KYLVSIPSLETPVPGPTG

SEQ ID NO: 561 - protein, 21 aa, synthetic construct
  REGION 1..21: note = GFR-binding peptide
  VARIANT 14..15: note = Xaa is C or S
LYLMSIASLKTPVXXAPGPTG

SEQ ID NO: 562 - protein, 18 aa, synthetic construct
  REGION 1..18: note = GFR-binding peptide
LYLMSIASQGTPVPGPTG

SEQ ID NO: 563 - protein, 18 aa, synthetic construct
  REGION 1..18: note = GFR-binding peptide
LYLMSIASEETPVPGPTG

SEQ ID NO: 564 - protein, 21 aa, synthetic construct
  REGION 1..21: note = GFR-binding peptide
KYLVSIPSLKTPVSTPPGPTG

SEQ ID NO: 565 - protein, 21 aa, synthetic construct
  REGION 1..21: note = GFR-binding peptide
  VARIANT 14..15: note = Xaa is C or S
KYLVSIPSLKTPVXXPPGPTG

SEQ ID NO: 566 - protein, 25 aa, synthetic construct
  REGION 1..25: note = GFR-binding peptide
  VARIANT 14: note = Xaa is C or S
FYLVSIANQGTPAXELGEDNPGPTG

SEQ ID NO: 567 - protein, 25 aa, synthetic construct
  REGION 1..25: note = GFR-binding peptide
  VARIANT 14..15: note = Xaa is C or S
KYLVSIPSLRTPVXXSAPAAGWFWW

SEQ ID NO: 568 - protein, 25 aa, synthetic construct
  REGION 1..25: note = GFR-binding peptide
  VARIANT 14..15: note = Xaa is C or S
LYLMSIASLKTPVXXAKSAKGWFWW

SEQ ID NO: 569 - protein, 25 aa, synthetic construct
  REGION 1..25: note = GFR-binding peptide
  VARIANT 14..15: note = Xaa is C or S
LYLMSIASMKTPTXXPGASGPGPTG

SEQ ID NO: 570 - protein, 25 aa, synthetic construct
  REGION 1..25: note = GFR-binding peptide
  VARIANT 14..15: note = Xaa is C or S
LYLMSIASLRAPVXXSAPAAPGPTG

SEQ ID NO: 571 - protein, 20 aa, synthetic construct
  REGION 1..20: note = GFR-binding peptide
  VARIANT 14..15: note = Xaa is C or S
YYVIPLPELKTPAXXAKPVA

SEQ ID NO: 572 - protein, 20 aa, synthetic construct
  REGION 1..20: note = GFR-binding peptide
  VARIANT 14..15: note = Xaa is C or S
YYLITLPELEQSVXXAKPIK

SEQ ID NO: 573 - protein, 20 aa, synthetic construct
  REGION 1..20: note = GFR-binding peptide
  VARIANT 14..15: note = Xaa is C or S
VKAVKVSRLRVRSXXTPPTS

SEQ ID NO: 574 - protein, 20 aa, synthetic construct
  REGION 1..20: note = GFR-binding peptide
  VARIANT 14..15: note = Xaa is C or S
MIQMTINSLKTPVXXAKGVK

SEQ ID NO: 575 - protein, 20 aa, synthetic construct
  REGION 1..20: note = GFR-binding peptide
  VARIANT 14..15: note = Xaa is C or S
IKRVQVPRLDVQTXXPSASA

SEQ ID NO: 576 - protein, 20 aa, synthetic construct
  REGION 1..20: note = GFR-binding peptide
  VARIANT 14..15: note = Xaa is C or S
FFLISLSSLKEPVXXAKSAA

SEQ ID NO: 577 - protein, 20 aa, synthetic construct
  REGION 1..20: note = GFR-binding peptide
  VARIANT 14..15: note = Xaa is C or S
FFLISLSSMKEPVXXPGASG

SEQ ID NO: 578 - protein, 20 aa, synthetic construct
  REGION 1..20: note = GFR-binding peptide
  VARIANT 14..15: note = Xaa is C or S
IYLISIPSTKAPVXXTSPVR

SEQ ID NO: 579 - protein, 20 aa, synthetic construct
  REGION 1..20: note = GFR-binding peptide
  VARIANT 14..15: note = Xaa is C or S
IYLISIPSLAAPVXXPAASA

SEQ ID NO: 580 - protein, 20 aa, synthetic construct
  REGION 1..20: note = GFR-binding peptide
  VARIANT 14: note = Xaa is C or S
IYLISIPSEEAPVXELGEDN

SEQ ID NO: 581 - protein, 13 aa, synthetic construct
  REGION 1..13: note = GFR-binding peptide
IYLISIPSQGAPV

SEQ ID NO: 582 - protein, 20 aa, synthetic construct
  REGION 1..20: note = GFR-binding peptide
  VARIANT 14: note = Xaa is C or S
IYLISIPSEEAPVXELGEDN

SEQ ID NO: 583 - protein, 13 aa, synthetic construct
  REGION 1..13: note = GFR-binding peptide
IYLISIPSEEAPV

SEQ ID NO: 584 - protein, 20 aa, synthetic construct
  REGION 1..20: note = GFR-binding peptide
  VARIANT 14..15: note = Xaa is C or S
IYLISIPSMKAPVXXPEPIG

SEQ ID NO: 585 - protein, 20 aa, synthetic construct
  REGION 1..20: note = GFR-binding peptide
  VARIANT 14..15: note = Xaa is C or S
IKRVQVPRLAQPVXXPAASA

SEQ ID NO: 586 - protein, 18 aa, synthetic construct
  REGION 1..18: note = GFR-binding peptide
  VARIANT 14..15: note = Xaa is C or S
IKRVQVPRLDQSVXXPSA

SEQ ID NO: 587 - protein, 20 aa, synthetic construct
  REGION 1..20: note = GFR-binding peptide
  VARIANT 14..15: note = Xaa is C or S
IKRVQVPRLDQPVXXPSASA

SEQ ID NO: 588 - protein, 20 aa, synthetic construct
  REGION 1..20: note = GFR-binding peptide
  VARIANT 14: note = Xaa is C or S
IKRVQVPREETPVXELGEDN

SEQ ID NO: 589 - protein, 8 aa, synthetic construct
  REGION 1..8: note = GFR-binding peptide
IKRVQVPR

SEQ ID NO: 590 - protein, 20 aa, synthetic construct
  REGION 1..20: note = GFR-binding peptide
  VARIANT 14..15: note = Xaa is C or S
MIQMTINSLQTPVXXPKPVT

SEQ ID NO: 591 - protein, 20 aa, synthetic construct
  REGION 1..20: note = GFR-binding peptide
  VARIANT 14..15: note = Xaa is C or S
MIQMTINSLKTPVXXAKPVA

SEQ ID NO: 592 - protein, 20 aa, synthetic construct
  REGION 1..20: note = GFR-binding peptide
  VARIANT 14..15: note = Xaa is C or S
FYLMNIPSLETPTXXAKPIS

SEQ ID NO: 593 - protein, 18 aa, synthetic construct
  REGION 1..18: note = GFR-binding peptide
FYLMNIPSLKTPTSTPKT

SEQ ID NO: 594 - protein, 20 aa, synthetic construct
  REGION 1..20: note = GFR-binding peptide
  VARIANT 14..15: note = Xaa is C or S
FYLMNIPSLKTPTXXPKPVY

SEQ ID NO: 595 - protein, 20 aa, synthetic construct
  REGION 1..20: note = GFR-binding peptide
  VARIANT 14..15: note = Xaa is C or S
FFLISLSSLAQPVXXPAASA

SEQ ID NO: 596 - protein, 20 aa, synthetic construct
  REGION 1..20: note = GFR-binding peptide
  VARIANT 14..15: note = Xaa is C or S
FFLISLSSLDQSVXXPSASA

SEQ ID NO: 597 - protein, 20 aa, synthetic construct
  REGION 1..20: note = GFR-binding peptide
  VARIANT 14..15: note = Xaa is C or S
LYLISIPELQTPAXXPKPVV

SEQ ID NO: 598 - protein, 20 aa, synthetic construct
  REGION 1..20: note = GFR-binding peptide
  VARIANT 14..15: note = Xaa is C or S
LYLISIPELKTPAXXAKPVA

SEQ ID NO: 599 - protein, 20 aa, synthetic construct
  REGION 1..20: note = GFR-binding peptide
  VARIANT 14..15: note = Xaa is C or S
LYLISIPELKTPVXXAKGVK

SEQ ID NO: 600 - protein, 20 aa, synthetic construct
  REGION 1..20: note = GFR-binding peptide
  VARIANT 16: note = Xaa is C or S
VYLMSLPKHHVRSPQXKVSS

SEQ ID NO: 601 - protein, 20 aa, synthetic construct
  REGION 1..20: note = GFR-binding peptide
  VARIANT 16: note = Xaa is C or S
VYLMSLPKLQVQTPRXQVNR

SEQ ID NO: 602 - protein, 20 aa, synthetic construct
  REGION 1..20: note = GFR-binding peptide
  VARIANT 14..15: note = Xaa is C or S
YYVIPLPELEQPVXXAKPIK

SEQ ID NO: 603 - protein, 20 aa, synthetic construct
  REGION 1..20: note = GFR-binding peptide
  VARIANT 14..15: note = Xaa is C or S
YYVIPLPEMKQPVXXPEPIG

SEQ ID NO: 604 - protein, 20 aa, synthetic construct
  REGION 1..20: note = GFR-binding peptide
  VARIANT 14..15: note = Xaa is C or S
YYVIPLPELEQPVXXAKPIS

SEQ ID NO: 605 - protein, 20 aa, synthetic construct
  REGION 1..20: note = GFR-binding peptide
  VARIANT 14..15: note = Xaa is C or S
YYLITLPELAQPVXXPAASA

SEQ ID NO: 606 - protein, 20 aa, synthetic construct
  REGION 1..20: note = GFR-binding peptide
  VARIANT 14..15: note = Xaa is C or S
YYLITLPELDQSVXXPSASA

SEQ ID NO: 607 - protein, 20 aa, synthetic construct
  REGION 1..20: note = GFR-binding peptide
  VARIANT 14: note = Xaa is C or S
YYLITLPEEETPVXELGEDN

SEQ ID NO: 608 - protein, 20 aa, synthetic construct
  REGION 1..20: note = GFR-binding peptide
  VARIANT 14: note = Xaa is C or S
FFLISLSSEETPVXELGEDN

SEQ ID NO: 609 - protein, 20 aa, synthetic construct
  REGION 1..20: note = GFR-binding peptide
  VARIANT 14..15: note = Xaa is C or S
MIQMTINSLKTPVXXAKSAK

SEQ ID NO: 610 - protein, 20 aa, synthetic construct
  REGION 1..20: note = GFR-binding peptide
  VARIANT 14..15: note = Xaa is C or S
MIQMTINSMKTPTXXPGASG

SEQ ID NO: 611 - protein, 20 aa, synthetic construct
  REGION 1..20: note = GFR-binding peptide
  VARIANT 14..15: note = Xaa is C or S
MIQMTINSLRAPVXXSAPAA

SEQ ID NO: 612 - protein, 20 aa, synthetic construct
  REGION 1..20: note = GFR-binding peptide
  VARIANT 14..15: note = Xaa is C or S
YYLVSTASTKTPAXXTSPVR

SEQ ID NO: 613 - protein, 20 aa, synthetic construct
  REGION 1..20: note = GFR-binding peptide
  VARIANT 14..15: note = Xaa is C or S
YYLVSTASLATPAXXPAASA

SEQ ID NO: 614 - protein, 20 aa, synthetic construct
  REGION 1..20: note = GFR-binding peptide
  VARIANT 14..15: note = Xaa is C or S
YYLVSTASLDTPAXXPSASA

SEQ ID NO: 615 - protein, 20 aa, synthetic construct
  REGION 1..20: note = GFR-binding peptide
  VARIANT 14..15: note = Xaa is C or S
VKAVKVSRLETPVXXAKPIS

SEQ ID NO: 616 - protein, 20 aa, synthetic construct
  REGION 1..20: note = GFR-binding peptide
  VARIANT 14: note = Xaa is C or S
VKAVKVSRLKTPAXTPKTVH

SEQ ID NO: 617 - protein, 20 aa, synthetic construct
  REGION 1..20: note = GFR-binding peptide
  VARIANT 14..15: note = Xaa is C or S
VKAVKVSRLQTPAXXPKPVT

SEQ ID NO: 618 - protein, 20 aa, synthetic construct
  REGION 1..20: note = GFR-binding peptide
  VARIANT 14..15: note = Xaa is C or S
YYVIPLPELKQPVXXAKGVK

SEQ ID NO: 619 - protein, 20 aa, synthetic construct
  REGION 1..20: note = GFR-binding peptide
  VARIANT 14..15: note = Xaa is C or S
YYVIPLPELKQPVXXAKSAK

SEQ ID NO: 620 - protein, 20 aa, synthetic construct
  REGION 1..20: note = GFR-binding peptide
  VARIANT 16: note = Xaa is C or S
KYLVSIPSLQTPVPRXQVNR

SEQ ID NO: 621 - protein, 20 aa, synthetic construct
  REGION 1..20: note = GFR-binding peptide
  VARIANT 14..15: note = Xaa is C or S
KYLVSIPSLETPVXXAKPIK

SEQ ID NO: 622 - protein, 20 aa, synthetic construct
  REGION 1..20: note = GFR-binding peptide
  VARIANT 14..15: note = Xaa is C or S
VKAVKVSRLAQPVXXPAASA

SEQ ID NO: 623 - protein, 13 aa, synthetic construct
  REGION 1..13: note = GFR-binding peptide
VKAVKVSRLDQSV

SEQ ID NO: 624 - protein, 20 aa, synthetic construct
  REGION 1..20: note = GFR-binding peptide
  VARIANT 14..15: note = Xaa is C or S
VKAVKVSRLDQPVXXPSASA

SEQ ID NO: 625 - protein, 20 aa, synthetic construct
  REGION 1..20: note = GFR-binding peptide
  VARIANT 14: note = Xaa is C or S
VKAVKVSREETPVXELGEDN

SEQ ID NO: 626 - protein, 13 aa, synthetic construct
  REGION 1..13: note = GFR-binding peptide
IKRVQVPRMKVQT

SEQ ID NO: 627 - protein, 20 aa, synthetic construct
  REGION 1..20: note = GFR-binding peptide
  VARIANT 14..15: note = Xaa is C or S
IKRVQVPRLEVQTXXAKPIS

SEQ ID NO: 628 - protein, 20 aa, synthetic construct
  REGION 1..20: note = GFR-binding peptide
  VARIANT 14..15: note = Xaa is C or S
FYLMNIPSLETPTXXAKPIK

SEQ ID NO: 629 - protein, 20 aa, synthetic construct
  REGION 1..20: note = GFR-binding peptide
  VARIANT 14..15: note = Xaa is C or S
FYLMNIPSMKTPTXXPEPIG

SEQ ID NO: 630 - protein, 13 aa, synthetic construct
  REGION 1..13: note = GFR-binding peptide
LYLMSIASQGTPV

SEQ ID NO: 631 - protein, 20 aa, synthetic construct
  REGION 1..20: note = GFR-binding peptide
  VARIANT 14: note = Xaa is C or S
LYLMSIASEETPVXELGEDN

SEQ ID NO: 632 - protein, 20 aa, synthetic construct
  REGION 1..20: note = GFR-binding peptide
  VARIANT 14: note = Xaa is C or S
IYLISIPSEETPVXELGEDN

SEQ ID NO: 633 - protein, 20 aa, synthetic construct
  REGION 1..20: note = GFR-binding peptide
  VARIANT 16: note = Xaa is C or S
IYLISIPSHHVRSPQXKVVV

SEQ ID NO: 634 - protein, 20 aa, synthetic construct
  REGION 1..20: note = GFR-binding peptide
  VARIANT 16: note = Xaa is C or S
IFLISIPSHHVRSPQXKVSS

SEQ ID NO: 635 - protein, 20 aa, synthetic construct
  REGION 1..20: note = GFR-binding peptide
  VARIANT 16: note = Xaa is C or S
IFLISIPSLQVQTPRXQVNR

SEQ ID NO: 636 - protein, 20 aa, synthetic construct
  REGION 1..20: note = GFR-binding peptide
  VARIANT 14..15: note = Xaa is C or S
FYLVSIANLKTPAXXPKPVY

SEQ ID NO: 637 - protein, 20 aa, synthetic construct
  REGION 1..20: note = GFR-binding peptide
  VARIANT 14..15: note = Xaa is C or S
LYLMSIASTKTPVXXTSPVR

SEQ ID NO: 638 - protein, 20 aa, synthetic construct
  REGION 1..20: note = GFR-binding peptide
  VARIANT 14..15: note = Xaa is C or S
LYLISIPELKTPAXXPKPVH

SEQ ID NO: 639 - protein, 20 aa, synthetic construct
  REGION 1..20: note = GFR-binding peptide
  VARIANT 14..15: note = Xaa is C or S
LYLISIPETKVPAXXTSPVR

SEQ ID NO: 640 - protein, 20 aa, synthetic construct
  REGION 1..20: note = GFR-binding peptide
  VARIANT 14..15: note = Xaa is C or S
LYLMSIASMKTPVXXPEPIG

SEQ ID NO: 641 - protein, 20 aa, synthetic construct
  REGION 1..20: note = GFR-binding peptide
  VARIANT 14: note = Xaa is C or S
LYLMSIASLKTPVXTPKTVH

SEQ ID NO: 642 - protein, 20 aa, synthetic construct
  REGION 1..20: note = GFR-binding peptide
  VARIANT 14..15: note = Xaa is C or S
LYLMSIASLKTPVXXPKPVY

SEQ ID NO: 643 - protein, 20 aa, synthetic construct
  REGION 1..20: note = GFR-binding peptide
  VARIANT 14..15: note = Xaa is C or S
LYLMSIASLQTPVXXPKPVT

SEQ ID NO: 644 - protein, 20 aa, synthetic construct
  REGION 1..20: note = GFR-binding peptide
  VARIANT 14..15: note = Xaa is C or S
LYLMSIASLKTPVXXAKPVA

SEQ ID NO: 645 - protein, 20 aa, synthetic construct
  REGION 1..20: note = GFR-binding peptide
  VARIANT 14..15: note = Xaa is C or S
LYLMSIASLKTPVXXAKSAK

SEQ ID NO: 646 - protein, 20 aa, synthetic construct
  REGION 1..20: note = GFR-binding peptide
  VARIANT 14..15: note = Xaa is C or S
LYLMSIASLKTPVXXPKPVH

SEQ ID NO: 647 - protein, 20 aa, synthetic construct
  REGION 1..20: note = GFR-binding peptide
  VARIANT 14..15: note = Xaa is C or S
LYLMSIASLATPVXXPAASA

SEQ ID NO: 648 - protein, 20 aa, synthetic construct
  REGION 1..20: note = GFR-binding peptide
  VARIANT 14..15: note = Xaa is C or S
LYLMSIASLDTPVXXPSASA

SEQ ID NO: 649 - protein, 20 aa, synthetic construct
  REGION 1..20: note = GFR-binding peptide
  VARIANT 14..15: note = Xaa is C or S
LYLMSIASLDTPVXXPSASA

SEQ ID NO: 650 - protein, 20 aa, synthetic construct
  REGION 1..20: note = GFR-binding peptide
  VARIANT 14..15: note = Xaa is C or S
LYLMSIASMKEPVXXPEPIG

SEQ ID NO: 651 - protein, 20 aa, synthetic construct
  REGION 1..20: note = GFR-binding peptide
  VARIANT 14: note = Xaa is C or S
LYLMSIASLKTPAXTPKTVH

SEQ ID NO: 652 - protein, 20 aa, synthetic construct
  REGION 1..20: note = GFR-binding peptide
  VARIANT 14..15: note = Xaa is C or S
LYLMSIASLKTPAXXPKPVY

SEQ ID NO: 653 - protein, 20 aa, synthetic construct
  REGION 1..20: note = GFR-binding peptide
  VARIANT 14..15: note = Xaa is C or S
LYLMSIASMKTPTXXPGASG

SEQ ID NO: 654 - protein, 20 aa, synthetic construct
  REGION 1..20: note = GFR-binding peptide
  VARIANT 14..15: note = Xaa is C or S
LYLMSIASLRAPVXXSAPAA

SEQ ID NO: 655 - protein, 20 aa, synthetic construct
  REGION 1..20: note = GFR-binding peptide
  VARIANT 14..15: note = Xaa is C or S
LYLMSIASTKVPAXXTSPVR

SEQ ID NO: 656 - protein, 20 aa, synthetic construct
  REGION 1..20: note = GFR-binding peptide
  VARIANT 14..15: note = Xaa is C or S
LYLMSIASLAQPVXXPAASA

SEQ ID NO: 657 - protein, 20 aa, synthetic construct
  REGION 1..20: note = GFR-binding peptide
  VARIANT 14..15: note = Xaa is C or S
LYLMSIASLDQPVXXPSASA

SEQ ID NO: 658 - protein, 20 aa, synthetic construct
  REGION 1..20: note = GFR-binding peptide
  VARIANT 16: note = Xaa is C or S
LYLMSIASHHVRSPQXKVSS

SEQ ID NO: 659 - protein, 20 aa, synthetic construct
  REGION 1..20: note = GFR-binding peptide
  VARIANT 14..15: note = Xaa is C or S
FFLISLSSLEEPVXXAKPIK

SEQ ID NO: 660 - protein, 20 aa, synthetic construct
  REGION 1..20: note = GFR-binding peptide
  VARIANT 14..15: note = Xaa is C or S
FFLISLSSLEEPVXXAKPIS

SEQ ID NO: 661 - protein, 20 aa, synthetic construct
  REGION 1..20: note = GFR-binding peptide
  VARIANT 14..15: note = Xaa is C or S
FFLISLSSLKEPVXXPKPVY

SEQ ID NO: 662 - protein, 20 aa, synthetic construct
  REGION 1..20: note = GFR-binding peptide
  VARIANT 14..15: note = Xaa is C or S
FFLISLSSLQEPVXXPKPVT

SEQ ID NO: 663 - protein, 20 aa, synthetic construct
  REGION 1..20: note = GFR-binding peptide
  VARIANT 14..15: note = Xaa is C or S
FFLISLSSLKEPVXXAKPVA

SEQ ID NO: 664 - protein, 20 aa, synthetic construct
  REGION 1..20: note = GFR-binding peptide
  VARIANT 14..15: note = Xaa is C or S
FFLISLSSLKEPVXXAKGVK

SEQ ID NO: 665 - protein, 20 aa, synthetic construct
  REGION 1..20: note = GFR-binding peptide
  VARIANT 14..15: note = Xaa is C or S
FFLISLSSLKEPVXXAKSAK

SEQ ID NO: 666 - protein, 20 aa, synthetic construct
  REGION 1..20: note = GFR-binding peptide
  VARIANT 14..15: note = Xaa is C or S
FFLISLSSLREPVXXSAPAA

SEQ ID NO: 667 - protein, 20 aa, synthetic construct
  REGION 1..20: note = GFR-binding peptide
  VARIANT 14..15: note = Xaa is C or S
FFLISLSSLREPVXXTPPTS

SEQ ID NO: 668 - protein, 20 aa, synthetic construct
  REGION 1..20: note = GFR-binding peptide
  VARIANT 14..15: note = Xaa is C or S
FFLISLSSLKEPVXXPKPVH

SEQ ID NO: 669 - protein, 20 aa, synthetic construct
  REGION 1..20: note = GFR-binding peptide
  VARIANT 14..15: note = Xaa is C or S
FFLISLSSTKEPVXXTSPVR

SEQ ID NO: 670 - protein, 20 aa, synthetic construct
  REGION 1..20: note = GFR-binding peptide
  VARIANT 14..15: note = Xaa is C or S
FFLISLSSLAEPVXXPAASA

SEQ ID NO: 671 - protein, 20 aa, synthetic construct
  REGION 1..20: note = GFR-binding peptide
  VARIANT 14..15: note = Xaa is C or S
FFLISLSSLDEPVXXPSASA

SEQ ID NO: 672 - protein, 20 aa, synthetic construct
  REGION 1..20: note = GFR-binding peptide
  VARIANT 14..15: note = Xaa is C or S
FFLISLSSLDEPVXXPSASA

SEQ ID NO: 673 - protein, 20 aa, synthetic construct
  REGION 1..20: note = GFR-binding peptide
  VARIANT 14..15: note = Xaa is C or S
FFLISLSSLETPVXXAKPIK

SEQ ID NO: 674 - protein, 20 aa, synthetic construct
  REGION 1..20: note = GFR-binding peptide
  VARIANT 14..15: note = Xaa is C or S
FFLISLSSLETPVXXAKPIS

SEQ ID NO: 675 - protein, 20 aa, synthetic construct
  REGION 1..20: note = GFR-binding peptide
  VARIANT 14: note = Xaa is C or S
FFLISLSSLKTPAXTPKTVH

SEQ ID NO: 676 - protein, 20 aa, synthetic construct
  REGION 1..20: note = GFR-binding peptide
  VARIANT 14..15: note = Xaa is C or S
FFLISLSSLKTPAXXPKPVY

SEQ ID NO: 677 - protein, 20 aa, synthetic construct
  REGION 1..20: note = GFR-binding peptide
  VARIANT 14..15: note = Xaa is C or S
FFLISLSSLQTPAXXPKPVT

SEQ ID NO: 678 - protein, 20 aa, synthetic construct
  REGION 1..20: note = GFR-binding peptide
  VARIANT 14..15: note = Xaa is C or S
FFLISLSSLKTPAXXAKPVA

SEQ ID NO: 679 - protein, 20 aa, synthetic construct
  REGION 1..20: note = GFR-binding peptide
  VARIANT 14..15: note = Xaa is C or S
FFLISLSSLKTPVXXAKGVK

SEQ ID NO: 680 - protein, 20 aa, synthetic construct
  REGION 1..20: note = GFR-binding peptide
  VARIANT 14..15: note = Xaa is C or S
FFLISLSSLKTPVXXAKSAK

SEQ ID NO: 681 - protein, 20 aa, synthetic construct
  REGION 1..20: note = GFR-binding peptide
  VARIANT 14..15: note = Xaa is C or S
FFLISLSSMKTPTXXPGASG

SEQ ID NO: 682 - protein, 20 aa, synthetic construct
  REGION 1..20: note = GFR-binding peptide
  VARIANT 14..15: note = Xaa is C or S
FFLISLSSLRAPVXXSAPAA

SEQ ID NO: 683 - protein, 20 aa, synthetic construct
  REGION 1..20: note = GFR-binding peptide
  VARIANT 14..15: note = Xaa is C or S
FFLISLSSLRTPVXXTPPTS

SEQ ID NO: 684 - protein, 20 aa, synthetic construct
  REGION 1..20: note = GFR-binding peptide
  VARIANT 14..15: note = Xaa is C or S
FFLISLSSLKTPAXXPKPVH

SEQ ID NO: 685 - protein, 20 aa, synthetic construct
  REGION 1..20: note = GFR-binding peptide
  VARIANT 14..15: note = Xaa is C or S
FFLISLSSTKVPAXXTSPVR

SEQ ID NO: 686 - protein, 20 aa, synthetic construct
  REGION 1..20: note = GFR-binding peptide
  VARIANT 14..15: note = Xaa is C or S
FFLISLSSLDQPVXXPSASA

SEQ ID NO: 687 - protein, 20 aa, synthetic construct
  REGION 1..20: note = GFR-binding peptide
  VARIANT 14: note = Xaa is C or S
FFLISLSSQGTPVXELGEDN

SEQ ID NO: 688 - protein, 20 aa, synthetic construct
  REGION 1..20: note = GFR-binding peptide
  VARIANT 16: note = Xaa is C or S
FFLISLSSHHVRSPQXKVSS

SEQ ID NO: 689 - protein, 20 aa, synthetic construct
  REGION 1..20: note = GFR-binding peptide
  VARIANT 16: note = Xaa is C or S
FFLISLSSLQVQTPRXQVNR

SEQ ID NO: 690 - protein, 20 aa, synthetic construct
  REGION 1..20: note = GFR-binding peptide
  VARIANT 14..15: note = Xaa is C or S
FYLVSIANLETPAXXAKPIK

SEQ ID NO: 691 - protein, 20 aa, synthetic construct
  REGION 1..20: note = GFR-binding peptide
  VARIANT 14..15: note = Xaa is C or S
FYLVSIANMKTPAXXPEPIG

SEQ ID NO: 692 - protein, 20 aa, synthetic construct
  REGION 1..20: note = GFR-binding peptide
  VARIANT 14..15: note = Xaa is C or S
FYLVSIANLETPAXXAKPIS

SEQ ID NO: 693 - protein, 20 aa, synthetic construct
  REGION 1..20: note = GFR-binding peptide
  VARIANT 14..15: note = Xaa is C or S
FYLVSIANLKTPAXXAKPVA

SEQ ID NO: 694 - protein, 20 aa, synthetic construct
  REGION 1..20: note = GFR-binding peptide
  VARIANT 14..15: note = Xaa is C or S
FYLVSIANLKTPAXXAKGVK

SEQ ID NO: 695 - protein, 20 aa, synthetic construct
  REGION 1..20: note = GFR-binding peptide
  VARIANT 14..15: note = Xaa is C or S
FYLVSIANLKTPAXXAKSAK

SEQ ID NO: 696 - protein, 20 aa, synthetic construct
  REGION 1..20: note = GFR-binding peptide
  VARIANT 14..15: note = Xaa is C or S
FYLVSIANMKTPAXXPGASG

SEQ ID NO: 697 - protein, 20 aa, synthetic construct
  REGION 1..20: note = GFR-binding peptide
  VARIANT 14..15: note = Xaa is C or S
FYLVSIANLRTPAXXSAPAA

SEQ ID NO: 698 - protein, 20 aa, synthetic construct
  REGION 1..20: note = GFR-binding peptide
  VARIANT 14..15: note = Xaa is C or S
FYLVSIANLRTPAXXTPPTS

SEQ ID NO: 699 - protein, 20 aa, synthetic construct
  REGION 1..20: note = GFR-binding peptide
  VARIANT 14..15: note = Xaa is C or S
FYLVSIANTKTPAXXTSPVR

SEQ ID NO: 700 - protein, 20 aa, synthetic construct
  REGION 1..20: note = GFR-binding peptide
  VARIANT 14..15: note = Xaa is C or S
FYLVSIANLATPAXXPAASA

SEQ ID NO: 701 - protein, 20 aa, synthetic construct
  REGION 1..20: note = GFR-binding peptide
  VARIANT 14..15: note = Xaa is C or S
FYLVSIANLDTPAXXPSASA

SEQ ID NO: 702 - protein, 20 aa, synthetic construct
  REGION 1..20: note = GFR-binding peptide
  VARIANT 14..15: note = Xaa is C or S
FYLVSIANLDTPAXXPSASA

SEQ ID NO: 703 - protein, 20 aa, synthetic construct
  REGION 1..20: note = GFR-binding peptide
  VARIANT 14..15: note = Xaa is C or S
FYLVSIANLETPVXXAKPIK

SEQ ID NO: 704 - protein, 20 aa, synthetic construct
  REGION 1..20: note = GFR-binding peptide
  VARIANT 14..15: note = Xaa is C or S
FYLVSIANMKEPVXXPEPIG

SEQ ID NO: 705 - protein, 20 aa, synthetic construct
  REGION 1..20: note = GFR-binding peptide
  VARIANT 14..15: note = Xaa is C or S
FYLVSIANLETPVXXAKPIS

SEQ ID NO: 706 - protein, 20 aa, synthetic construct
  REGION 1..20: note = GFR-binding peptide
  VARIANT 14..15: note = Xaa is C or S
FYLVSIANLKTPVXXAKGVK

SEQ ID NO: 707 - protein, 20 aa, synthetic construct
  REGION 1..20: note = GFR-binding peptide
  VARIANT 14..15: note = Xaa is C or S
FYLVSIANLKTPVXXAKSAK

SEQ ID NO: 708 - protein, 20 aa, synthetic construct
  REGION 1..20: note = GFR-binding peptide
  VARIANT 14..15: note = Xaa is C or S
FYLVSIANMKTPTXXPGASG

SEQ ID NO: 709 - protein, 20 aa, synthetic construct
  REGION 1..20: note = GFR-binding peptide
  VARIANT 14..15: note = Xaa is C or S
FYLVSIANLRAPVXXSAPAA

SEQ ID NO: 710 - protein, 20 aa, synthetic construct
  REGION 1..20: note = GFR-binding peptide
  VARIANT 14..15: note = Xaa is C or S
FYLVSIANLRTPVXXTPPTS

SEQ ID NO: 711 - protein, 20 aa, synthetic construct
  REGION 1..20: note = GFR-binding peptide
  VARIANT 14..15: note = Xaa is C or S
FYLVSIANTKVPAXXTSPVR

SEQ ID NO: 712 - protein, 20 aa, synthetic construct
  REGION 1..20: note = GFR-binding peptide
  VARIANT 14..15: note = Xaa is C or S
FYLVSIANLAQPVXXPAASA

SEQ ID NO: 713 - protein, 20 aa, synthetic construct
  REGION 1..20: note = GFR-binding peptide
  VARIANT 14..15: note = Xaa is C or S
FYLVSIANLDQSVXXPSASA

SEQ ID NO: 714 - protein, 20 aa, synthetic construct
  REGION 1..20: note = GFR-binding peptide
  VARIANT 14..15: note = Xaa is C or S
FYLVSIANLDQPVXXPSASA

SEQ ID NO: 715 - protein, 20 aa, synthetic construct
  REGION 1..20: note = GFR-binding peptide
  VARIANT 14: note = Xaa is C or S
FYLVSIANEETPVXELGEDN

SEQ ID NO: 716 - protein, 20 aa, synthetic construct
  REGION 1..20: note = GFR-binding peptide
  VARIANT 16: note = Xaa is C or S
FYLVSIANHHVRSPQXKVSS

SEQ ID NO: 717 - protein, 20 aa, synthetic construct
  REGION 1..20: note = GFR-binding peptide
  VARIANT 14..15: note = Xaa is C or S
YYLVSTASLETPAXXAKPIK

SEQ ID NO: 718 - protein, 20 aa, synthetic construct
  REGION 1..20: note = GFR-binding peptide
  VARIANT 14..15: note = Xaa is C or S
YYLVSTASMKTPAXXPEPIG

SEQ ID NO: 719 - protein, 20 aa, synthetic construct
  REGION 1..20: note = GFR-binding peptide
  VARIANT 14..15: note = Xaa is C or S
YYLVSTASLETPAXXAKPIS

SEQ ID NO: 720 - protein, 20 aa, synthetic construct
  REGION 1..20: note = GFR-binding peptide
  VARIANT 14: note = Xaa is C or S
YYLVSTASLKTPAXTPKTVH

SEQ ID NO: 721 - protein, 20 aa, synthetic construct
  REGION 1..20: note = GFR-binding peptide
  VARIANT 14..15: note = Xaa is C or S
YYLVSTASLKTPAXXPKPVY

SEQ ID NO: 722 - protein, 20 aa, synthetic construct
  REGION 1..20: note = GFR-binding peptide
  VARIANT 14..15: note = Xaa is C or S
YYLVSTASLQTPAXXPKPVT

SEQ ID NO: 723 - protein, 20 aa, synthetic construct
  REGION 1..20: note = GFR-binding peptide
  VARIANT 14..15: note = Xaa is C or S
YYLVSTASLKTPAXXAKGVK

SEQ ID NO: 724 - protein, 20 aa, synthetic construct
  REGION 1..20: note = GFR-binding peptide
  VARIANT 14..15: note = Xaa is C or S
YYLVSTASLKTPAXXAKSAK

SEQ ID NO: 725 - protein, 20 aa, synthetic construct
  REGION 1..20: note = GFR-binding peptide
  VARIANT 14..15: note = Xaa is C or S
YYLVSTASMKTPAXXPGASG

SEQ ID NO: 726 - protein, 20 aa, synthetic construct
  REGION 1..20: note = GFR-binding peptide
  VARIANT 14..15: note = Xaa is C or S
YYLVSTASLRTPAXXSAPAA

SEQ ID NO: 727 - protein, 20 aa, synthetic construct
  REGION 1..20: note = GFR-binding peptide
  VARIANT 14..15: note = Xaa is C or S
YYLVSTASLRTPAXXTPPTS

SEQ ID NO: 728 - protein, 20 aa, synthetic construct
  REGION 1..20: note = GFR-binding peptide
  VARIANT 14..15: note = Xaa is C or S
YYLVSTASLKTPAXXPKPVH

SEQ ID NO: 729 - protein, 20 aa, synthetic construct
  REGION 1..20: note = GFR-binding peptide
  VARIANT 14..15: note = Xaa is C or S
YYLVSTASLETPVXXAKPIS

SEQ ID NO: 730 - protein, 20 aa, synthetic construct
  REGION 1..20: note = GFR-binding peptide
  VARIANT 14..15: note = Xaa is C or S
YYLVSTASLKTPVXXAKGVK

SEQ ID NO: 731 - protein, 20 aa, synthetic construct
  REGION 1..20: note = GFR-binding peptide
  VARIANT 14..15: note = Xaa is C or S
YYLVSTASLKTPVXXAKSAK

SEQ ID NO: 732 - protein, 20 aa, synthetic construct
  REGION 1..20: note = GFR-binding peptide
  VARIANT 14..15: note = Xaa is C or S
YYLVSTASMKTPTXXPGASG

SEQ ID NO: 733 - protein, 20 aa, synthetic construct
  REGION 1..20: note = GFR-binding peptide
  VARIANT 14..15: note = Xaa is C or S
YYLVSTASLRAPVXXSAPAA

SEQ ID NO: 734 - protein, 20 aa, synthetic construct
  REGION 1..20: note = GFR-binding peptide
  VARIANT 14..15: note = Xaa is C or S
YYLVSTASLRTPVXXTPPTS

SEQ ID NO: 735 - protein, 20 aa, synthetic construct
  REGION 1..20: note = GFR-binding peptide
  VARIANT 14..15: note = Xaa is C or S
YYLVSTASTKVPAXXTSPVR

SEQ ID NO: 736 - protein, 20 aa, synthetic construct
  REGION 1..20: note = GFR-binding peptide
  VARIANT 14..15: note = Xaa is C or S
YYLVSTASLAQPVXXPAASA

SEQ ID NO: 737 - protein, 20 aa, synthetic construct
  REGION 1..20: note = GFR-binding peptide
  VARIANT 14..15: note = Xaa is C or S
YYLVSTASLDQSVXXPSASA

SEQ ID NO: 738 - protein, 20 aa, synthetic construct
  REGION 1..20: note = GFR-binding peptide
  VARIANT 14..15: note = Xaa is C or S
YYLVSTASLDQPVXXPSASA

SEQ ID NO: 739 - protein, 20 aa, synthetic construct
  REGION 1..20: note = GFR-binding peptide
  VARIANT 14: note = Xaa is C or S
YYLVSTASEETPVXELGEDN

SEQ ID NO: 740 - protein, 20 aa, synthetic construct
  REGION 1..20: note = GFR-binding peptide
  VARIANT 14: note = Xaa is C or S
YYLVSTASQGTPVXELGEDN

SEQ ID NO: 741 - protein, 20 aa, synthetic construct
  REGION 1..20: note = GFR-binding peptide
  VARIANT 16: note = Xaa is C or S
YYLVSTASHHVRSPQXKVSS

SEQ ID NO: 742 - protein, 20 aa, synthetic construct
  REGION 1..20: note = GFR-binding peptide
  VARIANT 16: note = Xaa is C or S
YYLVSTASLQVQTPRXQVNR

SEQ ID NO: 743 - protein, 20 aa, synthetic construct
  REGION 1..20: note = GFR-binding peptide
  VARIANT 14..15: note = Xaa is C or S
KYLVSIPSMKTPVXXPEPIG

SEQ ID NO: 744 - protein, 20 aa, synthetic construct
  REGION 1..20: note = GFR-binding peptide
  VARIANT 14..15: note = Xaa is C or S
KYLVSIPSLETPVXXAKPIS

SEQ ID NO: 745 - protein, 20 aa, synthetic construct
  REGION 1..20: note = GFR-binding peptide
  VARIANT 14: note = Xaa is C or S
KYLVSIPSLKTPVXTPKTVH

SEQ ID NO: 746 - protein, 20 aa, synthetic construct
  REGION 1..20: note = GFR-binding peptide
  VARIANT 14..15: note = Xaa is C or S
KYLVSIPSLKTPVXXPKPVY

SEQ ID NO: 747 - protein, 20 aa, synthetic construct
  REGION 1..20: note = GFR-binding peptide
  VARIANT 14..15: note = Xaa is C or S
KYLVSIPSLQTPVXXPKPVT

SEQ ID NO: 748 - protein, 20 aa, synthetic construct
  REGION 1..20: note = GFR-binding peptide
  VARIANT 14..15: note = Xaa is C or S
KYLVSIPSLKTPVXXAKPVA

SEQ ID NO: 749 - protein, 20 aa, synthetic construct
  REGION 1..20: note = GFR-binding peptide
  VARIANT 14..15: note = Xaa is C or S
KYLVSIPSLKTPVXXAKSAK

SEQ ID NO: 750 - protein, 20 aa, synthetic construct
  REGION 1..20: note = GFR-binding peptide
  VARIANT 14..15: note = Xaa is C or S
KYLVSIPSLRTPVXXSAPAA

SEQ ID NO: 751 - protein, 20 aa, synthetic construct
  REGION 1..20: note = GFR-binding peptide
  VARIANT 14..15: note = Xaa is C or S
KYLVSIPSLRTPVXXTPPTS

SEQ ID NO: 752 - protein, 20 aa, synthetic construct
  REGION 1..20: note = GFR-binding peptide
  VARIANT 14..15: note = Xaa is C or S
KYLVSIPSTKTPVXXTSPVR

SEQ ID NO: 753 - protein, 20 aa, synthetic construct
  REGION 1..20: note = GFR-binding peptide
  VARIANT 14..15: note = Xaa is C or S
KYLVSIPSLATPVXXPAASA

SEQ ID NO: 754 - protein, 20 aa, synthetic construct
  REGION 1..20: note = GFR-binding peptide
  VARIANT 14..15: note = Xaa is C or S
KYLVSIPSLDTPVXXPSASA

SEQ ID NO: 755 - protein, 20 aa, synthetic construct
  REGION 1..20: note = GFR-binding peptide
  VARIANT 14..15: note = Xaa is C or S
KYLVSIPSLDTPVXXPSASA

SEQ ID NO: 756 - protein, 20 aa, synthetic construct
  REGION 1..20: note = GFR-binding peptide
  VARIANT 14..15: note = Xaa is C or S
KYLVSIPSMKEPVXXPEPIG

SEQ ID NO: 757 - protein, 20 aa, synthetic construct
  REGION 1..20: note = GFR-binding peptide
  VARIANT 14: note = Xaa is C or S
KYLVSIPSLKTPAXTPKTVH

SEQ ID NO: 758 - protein, 20 aa, synthetic construct
  REGION 1..20: note = GFR-binding peptide
  VARIANT 14..15: note = Xaa is C or S
KYLVSIPSLKTPAXXPKPVY

SEQ ID NO: 759 - protein, 20 aa, synthetic construct
  REGION 1..20: note = GFR-binding peptide
  VARIANT 14..15: note = Xaa is C or S
KYLVSIPSLQTPAXXPKPVT

SEQ ID NO: 760 - protein, 20 aa, synthetic construct
  REGION 1..20: note = GFR-binding peptide
  VARIANT 14..15: note = Xaa is C or S
KYLVSIPSLKTPAXXAKPVA

SEQ ID NO: 761 - protein, 20 aa, synthetic construct
  REGION 1..20: note = GFR-binding peptide
  VARIANT 14..15: note = Xaa is C or S
KYLVSIPSMKTPTXXPGASG

SEQ ID NO: 762 - protein, 20 aa, synthetic construct
  REGION 1..20: note = GFR-binding peptide
  VARIANT 14..15: note = Xaa is C or S
KYLVSIPSLRAPVXXSAPAA

SEQ ID NO: 763 - protein, 20 aa, synthetic construct
  REGION 1..20: note = GFR-binding peptide
  VARIANT 14..15: note = Xaa is C or S
KYLVSIPSLKTPAXXPKPVH

SEQ ID NO: 764 - protein, 20 aa, synthetic construct
  REGION 1..20: note = GFR-binding peptide
  VARIANT 14..15: note = Xaa is C or S
KYLVSIPSTKVPAXXTSPVR

SEQ ID NO: 765 - protein, 20 aa, synthetic construct
  REGION 1..20: note = GFR-binding peptide
  VARIANT 14..15: note = Xaa is C or S
KYLVSIPSLAQPVXXPAASA

SEQ ID NO: 766 - protein, 20 aa, synthetic construct
  REGION 1..20: note = GFR-binding peptide
  VARIANT 14..15: note = Xaa is C or S
KYLVSIPSLDQSVXXPSASA

SEQ ID NO: 767 - protein, 20 aa, synthetic construct
  REGION 1..20: note = GFR-binding peptide
  VARIANT 14..15: note = Xaa is C or S
KYLVSIPSLDQPVXXPSASA

SEQ ID NO: 768 - protein, 20 aa, synthetic construct
  REGION 1..20: note = GFR-binding peptide
  VARIANT 16: note = Xaa is C or S
KYLVSIPSHHVRSPQXKVSS

SEQ ID NO: 769 - protein, 20 aa, synthetic construct
  REGION 1..20: note = GFR-binding peptide
  VARIANT 16: note = Xaa is C or S
KYLVSIPSLQVQTPRXQVNR

SEQ ID NO: 770 - protein, 20 aa, synthetic construct
  REGION 1..20: note = GFR-binding peptide
  VARIANT 14..15: note = Xaa is C or S
LYLISIPELETPVXXAKPIK

SEQ ID NO: 771 - protein, 20 aa, synthetic construct
  REGION 1..20: note = GFR-binding peptide
  VARIANT 14..15: note = Xaa is C or S
LYLISIPEMKTPVXXPEPIG

SEQ ID NO: 772 - protein, 20 aa, synthetic construct
  REGION 1..20: note = GFR-binding peptide
  VARIANT 14..15: note = Xaa is C or S
LYLISIPELETPVXXAKPIS

SEQ ID NO: 773 - protein, 20 aa, synthetic construct
  REGION 1..20: note = GFR-binding peptide
  VARIANT 14: note = Xaa is C or S
LYLISIPELKTPVXTPKTVH

SEQ ID NO: 774 - protein, 20 aa, synthetic construct
  REGION 1..20: note = GFR-binding peptide
  VARIANT 14..15: note = Xaa is C or S
LYLISIPELKTPVXXPKPVY

SEQ ID NO: 775 - protein, 20 aa, synthetic construct
  REGION 1..20: note = GFR-binding peptide
  VARIANT 14..15: note = Xaa is C or S
LYLISIPELQTPVXXPKPVT

SEQ ID NO: 776 - protein, 20 aa, synthetic construct
  REGION 1..20: note = GFR-binding peptide
  VARIANT 14..15: note = Xaa is C or S
LYLISIPELKTPVXXAKPVA

SEQ ID NO: 777 - protein, 20 aa, synthetic construct
  REGION 1..20: note = GFR-binding peptide
  VARIANT 14..15: note = Xaa is C or S
LYLISIPEMKTPVXXPGASG

SEQ ID NO: 778 - protein, 20 aa, synthetic construct
  REGION 1..20: note = GFR-binding peptide
  VARIANT 14..15: note = Xaa is C or S
LYLISIPELRTPVXXSAPAA

SEQ ID NO: 779 - protein, 20 aa, synthetic construct
  REGION 1..20: note = GFR-binding peptide
  VARIANT 14..15: note = Xaa is C or S
LYLISIPELRTPVXXTPPTS

SEQ ID NO: 780 - protein, 20 aa, synthetic construct
  REGION 1..20: note = GFR-binding peptide
  VARIANT 14..15: note = Xaa is C or S
LYLISIPELKTPVXXPKPVH

SEQ ID NO: 781 - protein, 20 aa, synthetic construct
  REGION 1..20: note = GFR-binding peptide
  VARIANT 14..15: note = Xaa is C or S
LYLISIPETKTPVXXTSPVR

SEQ ID NO: 782 - protein, 20 aa, synthetic construct
  REGION 1..20: note = GFR-binding peptide
  VARIANT 14..15: note = Xaa is C or S
LYLISIPELATPVXXPAASA

SEQ ID NO: 783 - protein, 20 aa, synthetic construct
  REGION 1..20: note = GFR-binding peptide
  VARIANT 14..15: note = Xaa is C or S
LYLISIPELDTPVXXPSASA

SEQ ID NO: 784 - protein, 20 aa, synthetic construct
  REGION 1..20: note = GFR-binding peptide
  VARIANT 14..15: note = Xaa is C or S
LYLISIPELDTPVXXPSASA

SEQ ID NO: 785 - protein, 20 aa, synthetic construct
  REGION 1..20: note = GFR-binding peptide
  VARIANT 14..15: note = Xaa is C or S
LYLISIPEMKEPVXXPEPIG

SEQ ID NO: 786 - protein, 20 aa, synthetic construct
  REGION 1..20: note = GFR-binding peptide
  VARIANT 14: note = Xaa is C or S
LYLISIPELKTPAXTPKTVH

SEQ ID NO: 787 - protein, 20 aa, synthetic construct
  REGION 1..20: note = GFR-binding peptide
  VARIANT 14..15: note = Xaa is C or S
LYLISIPELKTPAXXPKPVY

SEQ ID NO: 788 - protein, 20 aa, synthetic construct
  REGION 1..20: note = GFR-binding peptide
  VARIANT 14..15: note = Xaa is C or S
LYLISIPELQTPAXXPKPVT

SEQ ID NO: 789 - protein, 20 aa, synthetic construct
  REGION 1..20: note = GFR-binding peptide
  VARIANT 14..15: note = Xaa is C or S
LYLISIPEMKTPTXXPGASG

SEQ ID NO: 790 - protein, 20 aa, synthetic construct
  REGION 1..20: note = GFR-binding peptide
  VARIANT 14..15: note = Xaa is C or S
LYLISIPELRAPVXXSAPAA

SEQ ID NO: 791 - protein, 20 aa, synthetic construct
  REGION 1..20: note = GFR-binding peptide
  VARIANT 14..15: note = Xaa is C or S
LYLISIPELAQPVXXPAASA

SEQ ID NO: 792 - protein, 20 aa, synthetic construct
  REGION 1..20: note = GFR-binding peptide
  VARIANT 14..15: note = Xaa is C or S
LYLISIPELDQSVXXPSASA

SEQ ID NO: 793 - protein, 20 aa, synthetic construct
  REGION 1..20: note = GFR-binding peptide
  VARIANT 14..15: note = Xaa is C or S
LYLISIPELDQPVXXPSASA

SEQ ID NO: 794 - protein, 20 aa, synthetic construct
  REGION 1..20: note = GFR-binding peptide
  VARIANT 16: note = Xaa is C or S
LYLISIPEHHVRSPQXKVSS

SEQ ID NO: 795 - protein, 20 aa, synthetic construct
  REGION 1..20: note = GFR-binding peptide
  VARIANT 16: note = Xaa is C or S
LYLISIPELQVQTPRXQVNR

SEQ ID NO: 796 - protein, 20 aa, synthetic construct
  REGION 1..20: note = GFR-binding peptide
  VARIANT 14: note = Xaa is C or S
FYLMNIPSLKTPTXTPKTVH

SEQ ID NO: 797 - protein, 20 aa, synthetic construct
  REGION 1..20: note = GFR-binding peptide
  VARIANT 14..15: note = Xaa is C or S
FYLMNIPSLQTPTXXPKPVT

SEQ ID NO: 798 - protein, 20 aa, synthetic construct
  REGION 1..20: note = GFR-binding peptide
  VARIANT 14..15: note = Xaa is C or S
FYLMNIPSLKTPTXXAKPVA

SEQ ID NO: 799 - protein, 20 aa, synthetic construct
  REGION 1..20: note = GFR-binding peptide
  VARIANT 14..15: note = Xaa is C or S
FYLMNIPSLKTPTXXAKGVK

SEQ ID NO: 800 - protein, 20 aa, synthetic construct
  REGION 1..20: note = GFR-binding peptide
  VARIANT 14..15: note = Xaa is C or S
FYLMNIPSLKTPTXXAKSAK

SEQ ID NO: 801 - protein, 20 aa, synthetic construct
  REGION 1..20: note = GFR-binding peptide
  VARIANT 14..15: note = Xaa is C or S
FYLMNIPSLRTPTXXSAPAA

SEQ ID NO: 802 - protein, 20 aa, synthetic construct
  REGION 1..20: note = GFR-binding peptide
  VARIANT 14..15: note = Xaa is C or S
FYLMNIPSLRTPTXXTPPTS

SEQ ID NO: 803 - protein, 20 aa, synthetic construct
  REGION 1..20: note = GFR-binding peptide
  VARIANT 14..15: note = Xaa is C or S
FYLMNIPSLKTPTXXPKPVH

SEQ ID NO: 804 - protein, 20 aa, synthetic construct
  REGION 1..20: note = GFR-binding peptide
  VARIANT 14..15: note = Xaa is C or S
FYLMNIPSTKTPTXXTSPVR

SEQ ID NO: 805 - protein, 20 aa, synthetic construct
  REGION 1..20: note = GFR-binding peptide
  VARIANT 14..15: note = Xaa is C or S
FYLMNIPSLATPTXXPAASA

SEQ ID NO: 806 - protein, 20 aa, synthetic construct
  REGION 1..20: note = GFR-binding peptide
  VARIANT 14..15: note = Xaa is C or S
FYLMNIPSLDTPTXXPSASA

SEQ ID NO: 807 - protein, 20 aa, synthetic construct
  REGION 1..20: note = GFR-binding peptide
  VARIANT 14..15: note = Xaa is C or S
FYLMNIPSLDTPTXXPSASA

SEQ ID NO: 808 - protein, 20 aa, synthetic construct
  REGION 1..20: note = GFR-binding peptide
  VARIANT 14..15: note = Xaa is C or S
FYLMNIPSLETPVXXAKPIK

SEQ ID NO: 809 - protein, 20 aa, synthetic construct
  REGION 1..20: note = GFR-binding peptide
  VARIANT 14..15: note = Xaa is C or S
FYLMNIPSMKEPVXXPEPIG

SEQ ID NO: 810 - protein, 20 aa, synthetic construct
  REGION 1..20: note = GFR-binding peptide
  VARIANT 14..15: note = Xaa is C or S
FYLMNIPSLETPVXXAKPIS

SEQ ID NO: 811 - protein, 20 aa, synthetic construct
  REGION 1..20: note = GFR-binding peptide
  VARIANT 14: note = Xaa is C or S
FYLMNIPSLKTPAXTPKTVH

SEQ ID NO: 812 - protein, 20 aa, synthetic construct
  REGION 1..20: note = GFR-binding peptide
  VARIANT 14..15: note = Xaa is C or S
FYLMNIPSLKTPAXXPKPVY

SEQ ID NO: 813 - protein, 20 aa, synthetic construct
  REGION 1..20: note = GFR-binding peptide
  VARIANT 14..15: note = Xaa is C or S
FYLMNIPSLQTPAXXPKPVT

SEQ ID NO: 814 - protein, 20 aa, synthetic construct
  REGION 1..20: note = GFR-binding peptide
  VARIANT 14..15: note = Xaa is C or S
FYLMNIPSLKTPAXXAKPVA

SEQ ID NO: 815 - protein, 20 aa, synthetic construct
  REGION 1..20: note = GFR-binding peptide
  VARIANT 14..15: note = Xaa is C or S
FYLMNIPSLKTPVXXAKGVK

SEQ ID NO: 816 - protein, 20 aa, synthetic construct
  REGION 1..20: note = GFR-binding peptide
  VARIANT 14..15: note = Xaa is C or S
FYLMNIPSLKTPVXXAKSAK

SEQ ID NO: 817 - protein, 20 aa, synthetic construct
  REGION 1..20: note = GFR-binding peptide
  VARIANT 14..15: note = Xaa is C or S
FYLMNIPSLRAPVXXSAPAA

SEQ ID NO: 818 - protein, 20 aa, synthetic construct
  REGION 1..20: note = GFR-binding peptide
  VARIANT 14..15: note = Xaa is C or S
FYLMNIPSLRTPVXXTPPTS

SEQ ID NO: 819 - protein, 20 aa, synthetic construct
  REGION 1..20: note = GFR-binding peptide
  VARIANT 14..15: note = Xaa is C or S
FYLMNIPSLKTPAXXPKPVH

SEQ ID NO: 820 - protein, 20 aa, synthetic construct
  REGION 1..20: note = GFR-binding peptide
  VARIANT 14..15: note = Xaa is C or S
FYLMNIPSTKVPAXXTSPVR

SEQ ID NO: 821 - protein, 20 aa, synthetic construct
  REGION 1..20: note = GFR-binding peptide
  VARIANT 14..15: note = Xaa is C or S
FYLMNIPSLAQPVXXPAASA

SEQ ID NO: 822 - protein, 20 aa, synthetic construct
  REGION 1..20: note = GFR-binding peptide
  VARIANT 14..15: note = Xaa is C or S
FYLMNIPSLDQSVXXPSASA

SEQ ID NO: 823 - protein, 20 aa, synthetic construct
  REGION 1..20: note = GFR-binding peptide
  VARIANT 14..15: note = Xaa is C or S
FYLMNIPSLDQPVXXPSASA

SEQ ID NO: 824 - protein, 20 aa, synthetic construct
  REGION 1..20: note = GFR-binding peptide
  VARIANT 14: note = Xaa is C or S
FYLMNIPSEETPVXELGEDN

SEQ ID NO: 825 - protein, 20 aa, synthetic construct
  REGION 1..20: note = GFR-binding peptide
  VARIANT 14: note = Xaa is C or S
FYLMNIPSQGTPVXELGEDN

SEQ ID NO: 826 - protein, 20 aa, synthetic construct
  REGION 1..20: note = GFR-binding peptide
  VARIANT 16: note = Xaa is C or S
FYLMNIPSHHVRSPQXKVSS

SEQ ID NO: 827 - protein, 20 aa, synthetic construct
  REGION 1..20: note = GFR-binding peptide
  VARIANT 16: note = Xaa is C or S
FYLMNIPSLQVQTPRXQVNR

SEQ ID NO: 828 - protein, 20 aa, synthetic construct
  REGION 1..20: note = GFR-binding peptide
  VARIANT 14..15: note = Xaa is C or S
IYLISIPSLEAPVXXAKPIK

SEQ ID NO: 829 - protein, 20 aa, synthetic construct
  REGION 1..20: note = GFR-binding peptide
  VARIANT 14..15: note = Xaa is C or S
IYLISIPSLEAPVXXAKPIS

SEQ ID NO: 830 - protein, 20 aa, synthetic construct
  REGION 1..20: note = GFR-binding peptide
  VARIANT 14: note = Xaa is C or S
IYLISIPSLKAPVXTPKTVH

SEQ ID NO: 831 - protein, 20 aa, synthetic construct
  REGION 1..20: note = GFR-binding peptide
  VARIANT 14..15: note = Xaa is C or S
IYLISIPSLKAPVXXPKPVY

SEQ ID NO: 832 - protein, 20 aa, synthetic construct
  REGION 1..20: note = GFR-binding peptide
  VARIANT 14..15: note = Xaa is C or S
IYLISIPSLQAPVXXPKPVT

SEQ ID NO: 833 - protein, 20 aa, synthetic construct
  REGION 1..20: note = GFR-binding peptide
  VARIANT 14..15: note = Xaa is C or S
IYLISIPSLKAPVXXAKPVA

SEQ ID NO: 834 - protein, 20 aa, synthetic construct
  REGION 1..20: note = GFR-binding peptide
  VARIANT 14..15: note = Xaa is C or S
IYLISIPSLKAPVXXAKGVK

SEQ ID NO: 835 - protein, 20 aa, synthetic construct
  REGION 1..20: note = GFR-binding peptide
  VARIANT 14..15: note = Xaa is C or S
IYLISIPSLKAPVXXAKSAK

SEQ ID NO: 836 - protein, 20 aa, synthetic construct
  REGION 1..20: note = GFR-binding peptide
  VARIANT 14..15: note = Xaa is C or S
IYLISIPSMKAPVXXPGASG

SEQ ID NO: 837 - protein, 20 aa, synthetic construct
  REGION 1..20: note = GFR-binding peptide
  VARIANT 14..15: note = Xaa is C or S
IYLISIPSLRAPVXXTPPTS

SEQ ID NO: 838 - protein, 20 aa, synthetic construct
  REGION 1..20: note = GFR-binding peptide
  VARIANT 14..15: note = Xaa is C or S
IYLISIPSLKAPVXXPKPVH

SEQ ID NO: 839 - protein, 20 aa, synthetic construct
  REGION 1..20: note = GFR-binding peptide
  VARIANT 14..15: note = Xaa is C or S
IYLISIPSLDAPVXXPSASA

SEQ ID NO: 840 - protein, 20 aa, synthetic construct
  REGION 1..20: note = GFR-binding peptide
  VARIANT 14..15: note = Xaa is C or S
IYLISIPSLDAPVXXPSASA

SEQ ID NO: 841 - protein, 20 aa, synthetic construct
  REGION 1..20: note = GFR-binding peptide
  VARIANT 14..15: note = Xaa is C or S
IYLISIPSLETPVXXAKPIK

SEQ ID NO: 842 - protein, 20 aa, synthetic construct
  REGION 1..20: note = GFR-binding peptide
  VARIANT 14..15: note = Xaa is C or S
IYLISIPSMKEPVXXPEPIG

SEQ ID NO: 843 - protein, 20 aa, synthetic construct
  REGION 1..20: note = GFR-binding peptide
  VARIANT 14..15: note = Xaa is C or S
IYLISIPSLETPVXXAKPIS

SEQ ID NO: 844 - protein, 20 aa, synthetic construct
  REGION 1..20: note = GFR-binding peptide
  VARIANT 14: note = Xaa is C or S
IYLISIPSLKTPAXTPKTVH

SEQ ID NO: 845 - protein, 20 aa, synthetic construct
  REGION 1..20: note = GFR-binding peptide
  VARIANT 14..15: note = Xaa is C or S
IYLISIPSLKTPAXXPKPVY

SEQ ID NO: 846 - protein, 20 aa, synthetic construct
  REGION 1..20: note = GFR-binding peptide
  VARIANT 14..15: note = Xaa is C or S
IYLISIPSLQTPAXXPKPVT

SEQ ID NO: 847 - protein, 20 aa, synthetic construct
  REGION 1..20: note = GFR-binding peptide
  VARIANT 14..15: note = Xaa is C or S
IYLISIPSLKTPAXXAKPVA

SEQ ID NO: 848 - protein, 20 aa, synthetic construct
  REGION 1..20: note = GFR-binding peptide
  VARIANT 14..15: note = Xaa is C or S
IYLISIPSLKTPVXXAKGVK

SEQ ID NO: 849 - protein, 20 aa, synthetic construct
  REGION 1..20: note = GFR-binding peptide
  VARIANT 14..15: note = Xaa is C or S
IYLISIPSLKTPVXXAKSAK

SEQ ID NO: 850 - protein, 20 aa, synthetic construct
  REGION 1..20: note = GFR-binding peptide
  VARIANT 14..15: note = Xaa is C or S
IYLISIPSMKTPTXXPGASG

SEQ ID NO: 851 - protein, 20 aa, synthetic construct
  REGION 1..20: note = GFR-binding peptide
  VARIANT 14..15: note = Xaa is C or S
IYLISIPSLRTPVXXTPPTS

SEQ ID NO: 852 - protein, 20 aa, synthetic construct
  REGION 1..20: note = GFR-binding peptide
  VARIANT 14..15: note = Xaa is C or S
IYLISIPSLKTPAXXPKPVH

SEQ ID NO: 853 - protein, 20 aa, synthetic construct
  REGION 1..20: note = GFR-binding peptide
  VARIANT 14..15: note = Xaa is C or S
IYLISIPSTKVPAXXTSPVR

SEQ ID NO: 854 - protein, 20 aa, synthetic construct
  REGION 1..20: note = GFR-binding peptide
  VARIANT 14..15: note = Xaa is C or S
IYLISIPSLAQPVXXPAASA

SEQ ID NO: 855 - protein, 20 aa, synthetic construct
  REGION 1..20: note = GFR-binding peptide
  VARIANT 14..15: note = Xaa is C or S
IYLISIPSLDQSVXXPSASA

SEQ ID NO: 856 - protein, 20 aa, synthetic construct
  REGION 1..20: note = GFR-binding peptide
  VARIANT 14..15: note = Xaa is C or S
IYLISIPSLDQPVXXPSASA

SEQ ID NO: 857 - protein, 20 aa, synthetic construct
  REGION 1..20: note = GFR-binding peptide
  VARIANT 14: note = Xaa is C or S
IYLISIPSQGTPVXELGEDN

SEQ ID NO: 858 - protein, 20 aa, synthetic construct
  REGION 1..20: note = GFR-binding peptide
  VARIANT 16: note = Xaa is C or S
IYLISIPSHHVRSPQXKVSS

SEQ ID NO: 859 - protein, 20 aa, synthetic construct
  REGION 1..20: note = GFR-binding peptide
  VARIANT 16: note = Xaa is C or S
IYLISIPSLQVQTPRXQVNR

SEQ ID NO: 860 - protein, 20 aa, synthetic construct
  REGION 1..20: note = GFR-binding peptide
  VARIANT 14..15: note = Xaa is C or S
IFLISIPSLETPVXXAKPIK

SEQ ID NO: 861 - protein, 20 aa, synthetic construct
  REGION 1..20: note = GFR-binding peptide
  VARIANT 14..15: note = Xaa is C or S
IFLISIPSMKTPVXXPEPIG

SEQ ID NO: 862 - protein, 20 aa, synthetic construct
  REGION 1..20: note = GFR-binding peptide
  VARIANT 14..15: note = Xaa is C or S
IFLISIPSLETPVXXAKPIS

SEQ ID NO: 863 - protein, 20 aa, synthetic construct
  REGION 1..20: note = GFR-binding peptide
  VARIANT 14: note = Xaa is C or S
IFLISIPSLKTPVXTPKTVH

SEQ ID NO: 864 - protein, 20 aa, synthetic construct
  REGION 1..20: note = GFR-binding peptide
  VARIANT 14..15: note = Xaa is C or S
IFLISIPSLKTPVXXPKPVY

SEQ ID NO: 865 - protein, 20 aa, synthetic construct
  REGION 1..20: note = GFR-binding peptide
  VARIANT 14..15: note = Xaa is C or S
IFLISIPSLQTPVXXPKPVT

SEQ ID NO: 866 - protein, 20 aa, synthetic construct
  REGION 1..20: note = GFR-binding peptide
  VARIANT 14..15: note = Xaa is C or S
IFLISIPSLKTPVXXAKPVA

SEQ ID NO: 867 - protein, 20 aa, synthetic construct
  REGION 1..20: note = GFR-binding peptide
  VARIANT 14..15: note = Xaa is C or S
IFLISIPSLKTPVXXAKGVK

SEQ ID NO: 868 - protein, 20 aa, synthetic construct
  REGION 1..20: note = GFR-binding peptide
  VARIANT 14..15: note = Xaa is C or S
IFLISIPSLKTPVXXAKSAK

SEQ ID NO: 869 - protein, 20 aa, synthetic construct
  REGION 1..20: note = GFR-binding peptide
  VARIANT 14..15: note = Xaa is C or S
IFLISIPSMKTPVXXPGASG

SEQ ID NO: 870 - protein, 20 aa, synthetic construct
  REGION 1..20: note = GFR-binding peptide
  VARIANT 14..15: note = Xaa is C or S
IFLISIPSLRTPVXXSAPAA

SEQ ID NO: 871 - protein, 20 aa, synthetic construct
  REGION 1..20: note = GFR-binding peptide
  VARIANT 14..15: note = Xaa is C or S
IFLISIPSLKTPVXXPKPVH

SEQ ID NO: 872 - protein, 20 aa, synthetic construct
  REGION 1..20: note = GFR-binding peptide
  VARIANT 14..15: note = Xaa is C or S
IFLISIPSTKTPVXXTSPVR

SEQ ID NO: 873 - protein, 20 aa, synthetic construct
  REGION 1..20: note = GFR-binding peptide
  VARIANT 14..15: note = Xaa is C or S
IFLISIPSLATPVXXPAASA

SEQ ID NO: 874 - protein, 20 aa, synthetic construct
  REGION 1..20: note = GFR-binding peptide
  VARIANT 14..15: note = Xaa is C or S
IFLISIPSLDTPVXXPSASA

SEQ ID NO: 875 - protein, 20 aa, synthetic construct
  REGION 1..20: note = GFR-binding peptide
  VARIANT 14..15: note = Xaa is C or S
IFLISIPSLDTPVXXPSASA

SEQ ID NO: 876 - protein, 20 aa, synthetic construct
  REGION 1..20: note = GFR-binding peptide
  VARIANT 14..15: note = Xaa is C or S
IFLISIPSMKEPVXXPEPIG

SEQ ID NO: 877 - protein, 20 aa, synthetic construct
  REGION 1..20: note = GFR-binding peptide
  VARIANT 14: note = Xaa is C or S
IFLISIPSLKTPAXTPKTVH

SEQ ID NO: 878 - protein, 20 aa, synthetic construct
  REGION 1..20: note = GFR-binding peptide
  VARIANT 14..15: note = Xaa is C or S
IFLISIPSLKTPAXXPKPVY

SEQ ID NO: 879 - protein, 20 aa, synthetic construct
  REGION 1..20: note = GFR-binding peptide
  VARIANT 14..15: note = Xaa is C or S
IFLISIPSLQTPAXXPKPVT

SEQ ID NO: 880 - protein, 20 aa, synthetic construct
  REGION 1..20: note = GFR-binding peptide
  VARIANT 14..15: note = Xaa is C or S
IFLISIPSLKTPAXXAKPVA

SEQ ID NO: 881 - protein, 20 aa, synthetic construct
  REGION 1..20: note = GFR-binding peptide
  VARIANT 14..15: note = Xaa is C or S
IFLISIPSMKTPTXXPGASG

SEQ ID NO: 882 - protein, 20 aa, synthetic construct
  REGION 1..20: note = GFR-binding peptide
  VARIANT 14..15: note = Xaa is C or S
IFLISIPSLRAPVXXSAPAA

SEQ ID NO: 883 - protein, 20 aa, synthetic construct
  REGION 1..20: note = GFR-binding peptide
  VARIANT 14..15: note = Xaa is C or S
IFLISIPSLKTPAXXPKPVH

SEQ ID NO: 884 - protein, 20 aa, synthetic construct
  REGION 1..20: note = GFR-binding peptide
  VARIANT 14..15: note = Xaa is C or S
IFLISIPSTKVPAXXTSPVR

SEQ ID NO: 885 - protein, 20 aa, synthetic construct
  REGION 1..20: note = GFR-binding peptide
  VARIANT 14..15: note = Xaa is C or S
IFLISIPSLAQPVXXPAASA

SEQ ID NO: 886 - protein, 20 aa, synthetic construct
  REGION 1..20: note = GFR-binding peptide
  VARIANT 14..15: note = Xaa is C or S
IFLISIPSLDQSVXXPSASA

SEQ ID NO: 887 - protein, 20 aa, synthetic construct
  REGION 1..20: note = GFR-binding peptide
  VARIANT 14..15: note = Xaa is C or S
IFLISIPSLDQPVXXPSASA

SEQ ID NO: 888 - protein, 20 aa, synthetic construct
  REGION 1..20: note = GFR-binding peptide
  VARIANT 14..15: note = Xaa is C or S
VYLMSLPKLEVPAXXAKPIK

SEQ ID NO: 889 - protein, 20 aa, synthetic construct
  REGION 1..20: note = GFR-binding peptide
  VARIANT 14..15: note = Xaa is C or S
VYLMSLPKMKVPAXXPEPIG

SEQ ID NO: 890 - protein, 20 aa, synthetic construct
  REGION 1..20: note = GFR-binding peptide
  VARIANT 14..15: note = Xaa is C or S
VYLMSLPKLEVPAXXAKPIS

SEQ ID NO: 891 - protein, 20 aa, synthetic construct
  REGION 1..20: note = GFR-binding peptide
  VARIANT 14: note = Xaa is C or S
VYLMSLPKLKVPAXTPKTVH

SEQ ID NO: 892 - protein, 20 aa, synthetic construct
  REGION 1..20: note = GFR-binding peptide
  VARIANT 14..15: note = Xaa is C or S
VYLMSLPKLKVPAXXPKPVY

SEQ ID NO: 893 - protein, 20 aa, synthetic construct
  REGION 1..20: note = GFR-binding peptide
  VARIANT 14..15: note = Xaa is C or S
VYLMSLPKLQVPAXXPKPVT

SEQ ID NO: 894 - protein, 20 aa, synthetic construct
  REGION 1..20: note = GFR-binding peptide
  VARIANT 14..15: note = Xaa is C or S
VYLMSLPKLKVPAXXAKPVA

SEQ ID NO: 895 - protein, 20 aa, synthetic construct
  REGION 1..20: note = GFR-binding peptide
  VARIANT 14..15: note = Xaa is C or S
VYLMSLPKLKVPAXXAKGVK

SEQ ID NO: 896 - protein, 20 aa, synthetic construct
  REGION 1..20: note = GFR-binding peptide
  VARIANT 14..15: note = Xaa is C or S
VYLMSLPKLKVPAXXAKSAK

SEQ ID NO: 897 - protein, 20 aa, synthetic construct
  REGION 1..20: note = GFR-binding peptide
  VARIANT 14..15: note = Xaa is C or S
VYLMSLPKMKVPAXXPGASG

SEQ ID NO: 898 - protein, 20 aa, synthetic construct
  REGION 1..20: note = GFR-binding peptide
  VARIANT 14..15: note = Xaa is C or S
VYLMSLPKLRVPAXXSAPAA

SEQ ID NO: 899 - protein, 20 aa, synthetic construct
  REGION 1..20: note = GFR-binding peptide
  VARIANT 14..15: note = Xaa is C or S
VYLMSLPKLRVPAXXTPPTS

SEQ ID NO: 900 - protein, 20 aa, synthetic construct
  REGION 1..20: note = GFR-binding peptide
  VARIANT 14..15: note = Xaa is C or S
VYLMSLPKLKVPAXXPKPVH

SEQ ID NO: 901 - protein, 20 aa, synthetic construct
  REGION 1..20: note = GFR-binding peptide
  VARIANT 14..15: note = Xaa is C or S
VYLMSLPKLAVPAXXPAASA

SEQ ID NO: 902 - protein, 20 aa, synthetic construct
  REGION 1..20: note = GFR-binding peptide
  VARIANT 14..15: note = Xaa is C or S
VYLMSLPKLDVPAXXPSASA

SEQ ID NO: 903 - protein, 20 aa, synthetic construct
  REGION 1..20: note = GFR-binding peptide
  VARIANT 14..15: note = Xaa is C or S
VYLMSLPKLDVPAXXPSASA

SEQ ID NO: 904 - protein, 20 aa, synthetic construct
  REGION 1..20: note = GFR-binding peptide
  VARIANT 14..15: note = Xaa is C or S
VYLMSLPKLETPVXXAKPIK

SEQ ID NO: 905 - protein, 20 aa, synthetic construct
  REGION 1..20: note = GFR-binding peptide
  VARIANT 14..15: note = Xaa is C or S
VYLMSLPKMKEPVXXPEPIG

SEQ ID NO: 906 - protein, 20 aa, synthetic construct
  REGION 1..20: note = GFR-binding peptide
  VARIANT 14..15: note = Xaa is C or S
VYLMSLPKLETPVXXAKPIS

SEQ ID NO: 907 - protein, 20 aa, synthetic construct
  REGION 1..20: note = GFR-binding peptide
  VARIANT 14: note = Xaa is C or S
VYLMSLPKLKTPAXTPKTVH

SEQ ID NO: 908 - protein, 20 aa, synthetic construct
  REGION 1..20: note = GFR-binding peptide
  VARIANT 14..15: note = Xaa is C or S
VYLMSLPKLKTPAXXPKPVY

SEQ ID NO: 909 - protein, 20 aa, synthetic construct
  REGION 1..20: note = GFR-binding peptide
  VARIANT 14..15: note = Xaa is C or S
VYLMSLPKLQTPAXXPKPVT

SEQ ID NO: 910 - protein, 20 aa, synthetic construct
  REGION 1..20: note = GFR-binding peptide
  VARIANT 14..15: note = Xaa is C or S
VYLMSLPKLKTPAXXAKPVA

SEQ ID NO: 911 - protein, 20 aa, synthetic construct
  REGION 1..20: note = GFR-binding peptide
  VARIANT 14..15: note = Xaa is C or S
VYLMSLPKLKTPVXXAKGVK

SEQ ID NO: 912 - protein, 20 aa, synthetic construct
  REGION 1..20: note = GFR-binding peptide
  VARIANT 14..15: note = Xaa is C or S
VYLMSLPKLKTPVXXAKSAK

SEQ ID NO: 913 - protein, 20 aa, synthetic construct
  REGION 1..20: note = GFR-binding peptide
  VARIANT 14..15: note = Xaa is C or S
VYLMSLPKMKTPTXXPGASG

SEQ ID NO: 914 - protein, 20 aa, synthetic construct
  REGION 1..20: note = GFR-binding peptide
  VARIANT 14..15: note = Xaa is C or S
VYLMSLPKLRAPVXXSAPAA

SEQ ID NO: 915 - protein, 20 aa, synthetic construct
  REGION 1..20: note = GFR-binding peptide
  VARIANT 14..15: note = Xaa is C or S
VYLMSLPKLRTPVXXTPPTS

SEQ ID NO: 916 - protein, 20 aa, synthetic construct
  REGION 1..20: note = GFR-binding peptide
  VARIANT 14..15: note = Xaa is C or S
VYLMSLPKLKTPAXXPKPVH

SEQ ID NO: 917 - protein, 20 aa, synthetic construct
  REGION 1..20: note = GFR-binding peptide
  VARIANT 14..15: note = Xaa is C or S
VYLMSLPKLAQPVXXPAASA

SEQ ID NO: 918 - protein, 20 aa, synthetic construct
  REGION 1..20: note = GFR-binding peptide
  VARIANT 14..15: note = Xaa is C or S
VYLMSLPKLDQSVXXPSASA

SEQ ID NO: 919 - protein, 20 aa, synthetic construct
  REGION 1..20: note = GFR-binding peptide
  VARIANT 14..15: note = Xaa is C or S
VYLMSLPKLDQPVXXPSASA

SEQ ID NO: 920 - protein, 20 aa, synthetic construct
  REGION 1..20: note = GFR-binding peptide
  VARIANT 14: note = Xaa is C or S
VYLMSLPKEETPVXELGEDN

SEQ ID NO: 921 - protein, 20 aa, synthetic construct
  REGION 1..20: note = GFR-binding peptide
  VARIANT 14: note = Xaa is C or S
VYLMSLPKQGTPVXELGEDN

SEQ ID NO: 922 - protein, 20 aa, synthetic construct
  REGION 1..20: note = GFR-binding peptide
  VARIANT 14: note = Xaa is C or S
YYVIPLPELKQPVXTPKTVH

SEQ ID NO: 923 - protein, 20 aa, synthetic construct
  REGION 1..20: note = GFR-binding peptide
  VARIANT 14..15: note = Xaa is C or S
YYVIPLPELKQPVXXPKPVY

SEQ ID NO: 924 - protein, 20 aa, synthetic construct
  REGION 1..20: note = GFR-binding peptide
  VARIANT 14..15: note = Xaa is C or S
YYVIPLPELQQPVXXPKPVT

SEQ ID NO: 925 - protein, 20 aa, synthetic construct
  REGION 1..20: note = GFR-binding peptide
  VARIANT 14..15: note = Xaa is C or S
YYVIPLPELKQPVXXAKPVA

SEQ ID NO: 926 - protein, 20 aa, synthetic construct
  REGION 1..20: note = GFR-binding peptide
  VARIANT 14..15: note = Xaa is C or S
YYVIPLPEMKQPVXXPGASG

SEQ ID NO: 927 - protein, 20 aa, synthetic construct
  REGION 1..20: note = GFR-binding peptide
  VARIANT 14..15: note = Xaa is C or S
YYVIPLPELRQPVXXSAPAA

SEQ ID NO: 928 - protein, 20 aa, synthetic construct
  REGION 1..20: note = GFR-binding peptide
  VARIANT 14..15: note = Xaa is C or S
YYVIPLPELRQPVXXTPPTS

SEQ ID NO: 929 - protein, 20 aa, synthetic construct
  REGION 1..20: note = GFR-binding peptide
  VARIANT 14..15: note = Xaa is C or S
YYVIPLPELKQPVXXPKPVH

SEQ ID NO: 930 - protein, 20 aa, synthetic construct
  REGION 1..20: note = GFR-binding peptide
  VARIANT 14..15: note = Xaa is C or S
YYVIPLPETKQPVXXTSPVR

SEQ ID NO: 931 - protein, 20 aa, synthetic construct
  REGION 1..20: note = GFR-binding peptide
  VARIANT 14..15: note = Xaa is C or S
YYVIPLPELDQPVXXPSASA

SEQ ID NO: 932 - protein, 20 aa, synthetic construct
  REGION 1..20: note = GFR-binding peptide
  VARIANT 14..15: note = Xaa is C or S
YYVIPLPELDQPVXXPSASA

SEQ ID NO: 933 - protein, 20 aa, synthetic construct
  REGION 1..20: note = GFR-binding peptide
  VARIANT 14..15: note = Xaa is C or S
YYVIPLPELETPVXXAKPIK

SEQ ID NO: 934 - protein, 20 aa, synthetic construct
  REGION 1..20: note = GFR-binding peptide
  VARIANT 14..15: note = Xaa is C or S
YYVIPLPEMKEPVXXPEPIG

SEQ ID NO: 935 - protein, 20 aa, synthetic construct
  REGION 1..20: note = GFR-binding peptide
  VARIANT 14..15: note = Xaa is C or S
YYVIPLPELETPVXXAKPIS

SEQ ID NO: 936 - protein, 20 aa, synthetic construct
  REGION 1..20: note = GFR-binding peptide
  VARIANT 14: note = Xaa is C or S
YYVIPLPELKTPAXTPKTVH

SEQ ID NO: 937 - protein, 20 aa, synthetic construct
  REGION 1..20: note = GFR-binding peptide
  VARIANT 14..15: note = Xaa is C or S
YYVIPLPELKTPAXXPKPVY

SEQ ID NO: 938 - protein, 20 aa, synthetic construct
  REGION 1..20: note = GFR-binding peptide
  VARIANT 14..15: note = Xaa is C or S
YYVIPLPELQTPAXXPKPVT

SEQ ID NO: 939 - protein, 20 aa, synthetic construct
  REGION 1..20: note = GFR-binding peptide
  VARIANT 14..15: note = Xaa is C or S
YYVIPLPELKTPVXXAKGVK

SEQ ID NO: 940 - protein, 20 aa, synthetic construct
  REGION 1..20: note = GFR-binding peptide
  VARIANT 14..15: note = Xaa is C or S
YYVIPLPELKTPVXXAKSAK

SEQ ID NO: 941 - protein, 20 aa, synthetic construct
  REGION 1..20: note = GFR-binding peptide
  VARIANT 14..15: note = Xaa is C or S
YYVIPLPEMKTPTXXPGASG

SEQ ID NO: 942 - protein, 20 aa, synthetic construct
  REGION 1..20: note = GFR-binding peptide
  VARIANT 14..15: note = Xaa is C or S
YYVIPLPELRAPVXXSAPAA

SEQ ID NO: 943 - protein, 20 aa, synthetic construct
  REGION 1..20: note = GFR-binding peptide
  VARIANT 14..15: note = Xaa is C or S
YYVIPLPELRTPVXXTPPTS

SEQ ID NO: 944 - protein, 20 aa, synthetic construct
  REGION 1..20: note = GFR-binding peptide
  VARIANT 14..15: note = Xaa is C or S
YYVIPLPELKTPAXXPKPVH

SEQ ID NO: 945 - protein, 20 aa, synthetic construct
  REGION 1..20: note = GFR-binding peptide
  VARIANT 14..15: note = Xaa is C or S
YYVIPLPETKVPAXXTSPVR

SEQ ID NO: 946 - protein, 20 aa, synthetic construct
  REGION 1..20: note = GFR-binding peptide
  VARIANT 14..15: note = Xaa is C or S
YYVIPLPELDQSVXXPSASA

SEQ ID NO: 947 - protein, 20 aa, synthetic construct
  REGION 1..20: note = GFR-binding peptide
  VARIANT 14: note = Xaa is C or S
YYVIPLPEEETPVXELGEDN

SEQ ID NO: 948 - protein, 20 aa, synthetic construct
  REGION 1..20: note = GFR-binding peptide
  VARIANT 14: note = Xaa is C or S
YYVIPLPEQGTPVXELGEDN

SEQ ID NO: 949 - protein, 20 aa, synthetic construct
  REGION 1..20: note = GFR-binding peptide
  VARIANT 16: note = Xaa is C or S
YYVIPLPEHHVRSPQXKVSS

SEQ ID NO: 950 - protein, 20 aa, synthetic construct
  REGION 1..20: note = GFR-binding peptide
  VARIANT 16: note = Xaa is C or S
YYVIPLPELQVQTPRXQVNR

SEQ ID NO: 951 - protein, 20 aa, synthetic construct
  REGION 1..20: note = GFR-binding peptide
  VARIANT 14..15: note = Xaa is C or S
YYLITLPEMKQSVXXPEPIG

SEQ ID NO: 952 - protein, 20 aa, synthetic construct
  REGION 1..20: note = GFR-binding peptide
  VARIANT 14..15: note = Xaa is C or S
YYLITLPELEQSVXXAKPIS

SEQ ID NO: 953 - protein, 20 aa, synthetic construct
  REGION 1..20: note = GFR-binding peptide
  VARIANT 14: note = Xaa is C or S
YYLITLPELKQSVXTPKTVH

SEQ ID NO: 954 - protein, 20 aa, synthetic construct
  REGION 1..20: note = GFR-binding peptide
  VARIANT 14..15: note = Xaa is C or S
YYLITLPELKQSVXXPKPVY

SEQ ID NO: 955 - protein, 20 aa, synthetic construct
  REGION 1..20: note = GFR-binding peptide
  VARIANT 14..15: note = Xaa is C or S
YYLITLPELQQSVXXPKPVT

SEQ ID NO: 956 - protein, 20 aa, synthetic construct
  REGION 1..20: note = GFR-binding peptide
  VARIANT 14..15: note = Xaa is C or S
YYLITLPELKQSVXXAKPVA

SEQ ID NO: 957 - protein, 20 aa, synthetic construct
  REGION 1..20: note = GFR-binding peptide
  VARIANT 14..15: note = Xaa is C or S
YYLITLPELKQSVXXAKSAK

SEQ ID NO: 958 - protein, 20 aa, synthetic construct
  REGION 1..20: note = GFR-binding peptide
  VARIANT 14..15: note = Xaa is C or S
YYLITLPEMKQSVXXPGASG

SEQ ID NO: 959 - protein, 20 aa, synthetic construct
  REGION 1..20: note = GFR-binding peptide
  VARIANT 14..15: note = Xaa is C or S
YYLITLPELRQSVXXSAPAA

SEQ ID NO: 960 - protein, 20 aa, synthetic construct
  REGION 1..20: note = GFR-binding peptide
  VARIANT 14..15: note = Xaa is C or S
YYLITLPELRQSVXXTPPTS

SEQ ID NO: 961 - protein, 20 aa, synthetic construct
  REGION 1..20: note = GFR-binding peptide
  VARIANT 14..15: note = Xaa is C or S
YYLITLPELKQSVXXPKPVH

SEQ ID NO: 962 - protein, 20 aa, synthetic construct
  REGION 1..20: note = GFR-binding peptide
  VARIANT 14..15: note = Xaa is C or S
YYLITLPETKQSVXXTSPVR

SEQ ID NO: 963 - protein, 20 aa, synthetic construct
  REGION 1..20: note = GFR-binding peptide
  VARIANT 14..15: note = Xaa is C or S
YYLITLPELAQSVXXPAASA

SEQ ID NO: 964 - protein, 20 aa, synthetic construct
  REGION 1..20: note = GFR-binding peptide
  VARIANT 14..15: note = Xaa is C or S
YYLITLPELETPVXXAKPIK

SEQ ID NO: 965 - protein, 20 aa, synthetic construct
  REGION 1..20: note = GFR-binding peptide
  VARIANT 14..15: note = Xaa is C or S
YYLITLPEMKEPVXXPEPIG

SEQ ID NO: 966 - protein, 20 aa, synthetic construct
  REGION 1..20: note = GFR-binding peptide
  VARIANT 14..15: note = Xaa is C or S
YYLITLPELETPVXXAKPIS

SEQ ID NO: 967 - protein, 20 aa, synthetic construct
  REGION 1..20: note = GFR-binding peptide
  VARIANT 14: note = Xaa is C or S
YYLITLPELKTPAXTPKTVH

SEQ ID NO: 968 - protein, 20 aa, synthetic construct
  REGION 1..20: note = GFR-binding peptide
  VARIANT 14..15: note = Xaa is C or S
YYLITLPELKTPAXXPKPVY

SEQ ID NO: 969 - protein, 20 aa, synthetic construct
  REGION 1..20: note = GFR-binding peptide
  VARIANT 14..15: note = Xaa is C or S
YYLITLPELQTPAXXPKPVT

SEQ ID NO: 970 - protein, 20 aa, synthetic construct
  REGION 1..20: note = GFR-binding peptide
  VARIANT 14..15: note = Xaa is C or S
YYLITLPELKTPAXXAKPVA

SEQ ID NO: 971 - protein, 20 aa, synthetic construct
  REGION 1..20: note = GFR-binding peptide
  VARIANT 14..15: note = Xaa is C or S
YYLITLPELKTPVXXAKSAK

SEQ ID NO: 972 - protein, 20 aa, synthetic construct
  REGION 1..20: note = GFR-binding peptide
  VARIANT 14..15: note = Xaa is C or S
YYLITLPEMKTPTXXPGASG

SEQ ID NO: 973 - protein, 20 aa, synthetic construct
  REGION 1..20: note = GFR-binding peptide
  VARIANT 14..15: note = Xaa is C or S
YYLITLPELRAPVXXSAPAA

SEQ ID NO: 974 - protein, 20 aa, synthetic construct
  REGION 1..20: note = GFR-binding peptide
  VARIANT 14..15: note = Xaa is C or S
YYLITLPELRTPVXXTPPTS

SEQ ID NO: 975 - protein, 20 aa, synthetic construct
  REGION 1..20: note = GFR-binding peptide
  VARIANT 14..15: note = Xaa is C or S
YYLITLPELKTPAXXPKPVH

SEQ ID NO: 976 - protein, 20 aa, synthetic construct
  REGION 1..20: note = GFR-binding peptide
  VARIANT 14..15: note = Xaa is C or S
YYLITLPETKVPAXXTSPVR

SEQ ID NO: 977 - protein, 20 aa, synthetic construct
  REGION 1..20: note = GFR-binding peptide
  VARIANT 14: note = Xaa is C or S
YYLITLPEQGTPVXELGEDN

SEQ ID NO: 978 - protein, 20 aa, synthetic construct
  REGION 1..20: note = GFR-binding peptide
  VARIANT 16: note = Xaa is C or S
YYLITLPEHHVRSPQXKVSS

SEQ ID NO: 979 - protein, 20 aa, synthetic construct
  REGION 1..20: note = GFR-binding peptide
  VARIANT 16: note = Xaa is C or S
YYLITLPELQVQTPRXQVNR

SEQ ID NO: 980 - protein, 20 aa, synthetic construct
  REGION 1..20: note = GFR-binding peptide
  VARIANT 14..15: note = Xaa is C or S
YYLITLPELEQPVXXAKPIK

SEQ ID NO: 981 - protein, 20 aa, synthetic construct
  REGION 1..20: note = GFR-binding peptide
  VARIANT 14..15: note = Xaa is C or S
YYLITLPEMKQPVXXPEPIG

SEQ ID NO: 982 - protein, 20 aa, synthetic construct
  REGION 1..20: note = GFR-binding peptide
  VARIANT 14..15: note = Xaa is C or S
YYLITLPELEQPVXXAKPIS

SEQ ID NO: 983 - protein, 20 aa, synthetic construct
  REGION 1..20: note = GFR-binding peptide
  VARIANT 14: note = Xaa is C or S
YYLITLPELKQPVXTPKTVH

SEQ ID NO: 984 - protein, 20 aa, synthetic construct
  REGION 1..20: note = GFR-binding peptide
  VARIANT 14..15: note = Xaa is C or S
YYLITLPELKQPVXXPKPVY

SEQ ID NO: 985 - protein, 20 aa, synthetic construct
  REGION 1..20: note = GFR-binding peptide
  VARIANT 14..15: note = Xaa is C or S
YYLITLPELQQPVXXPKPVT

SEQ ID NO: 986 - protein, 20 aa, synthetic construct
  REGION 1..20: note = GFR-binding peptide
  VARIANT 14..15: note = Xaa is C or S
YYLITLPELKQPVXXAKPVA

SEQ ID NO: 987 - protein, 20 aa, synthetic construct
  REGION 1..20: note = GFR-binding peptide
  VARIANT 14..15: note = Xaa is C or S
YYLITLPELKQPVXXAKGVK

SEQ ID NO: 988 - protein, 20 aa, synthetic construct
  REGION 1..20: note = GFR-binding peptide
  VARIANT 14..15: note = Xaa is C or S
YYLITLPELKQPVXXAKSAK

SEQ ID NO: 989 - protein, 20 aa, synthetic construct
  REGION 1..20: note = GFR-binding peptide
  VARIANT 14..15: note = Xaa is C or S
YYLITLPEMKQPVXXPGASG

SEQ ID NO: 990 - protein, 20 aa, synthetic construct
  REGION 1..20: note = GFR-binding peptide
  VARIANT 14..15: note = Xaa is C or S
YYLITLPELRQPVXXSAPAA

SEQ ID NO: 991 - protein, 20 aa, synthetic construct
  REGION 1..20: note = GFR-binding peptide
  VARIANT 14..15: note = Xaa is C or S
YYLITLPELRQPVXXTPPTS

SEQ ID NO: 992 - protein, 20 aa, synthetic construct
  REGION 1..20: note = GFR-binding peptide
  VARIANT 14..15: note = Xaa is C or S
YYLITLPELKQPVXXPKPVH

SEQ ID NO: 993 - protein, 20 aa, synthetic construct
  REGION 1..20: note = GFR-binding peptide
  VARIANT 14..15: note = Xaa is C or S
YYLITLPETKQPVXXTSPVR

SEQ ID NO: 994 - protein, 20 aa, synthetic construct
  REGION 1..20: note = GFR-binding peptide
  VARIANT 14..15: note = Xaa is C or S
YYLITLPELDQPVXXPSASA

SEQ ID NO: 995 - protein, 20 aa, synthetic construct
  REGION 1..20: note = GFR-binding peptide
  VARIANT 14: note = Xaa is C or S
MIQMTINSQGTPVXELGEDN

SEQ ID NO: 996 - protein, 20 aa, synthetic construct
  REGION 1..20: note = GFR-binding peptide
  VARIANT 14..15: note = Xaa is C or S
MIQMTINSMKEPVXXPEPIG

SEQ ID NO: 997 - protein, 20 aa, synthetic construct
  REGION 1..20: note = GFR-binding peptide
  VARIANT 14: note = Xaa is C or S
MIQMTINSLKTPAXTPKTVH

SEQ ID NO: 998 - protein, 20 aa, synthetic construct
  REGION 1..20: note = GFR-binding peptide
  VARIANT 14..15: note = Xaa is C or S
MIQMTINSLKTPAXXPKPVY

SEQ ID NO: 999 - protein, 20 aa, synthetic construct
  REGION 1..20: note = GFR-binding peptide
  VARIANT 14..15: note = Xaa is C or S
MIQMTINSLQTPAXXPKPVT

SEQ ID NO: 1000 - protein, 20 aa, synthetic construct
  REGION 1..20: note = GFR-binding peptide
  VARIANT 14..15: note = Xaa is C or S
MIQMTINSLKTPAXXAKPVA

SEQ ID NO: 1001 - protein, 20 aa, synthetic construct
  REGION 1..20: note = GFR-binding peptide
  VARIANT 14..15: note = Xaa is C or S
MIQMTINSLKTPAXXPKPVH

SEQ ID NO: 1002 - protein, 20 aa, synthetic construct
  REGION 1..20: note = GFR-binding peptide
  VARIANT 14..15: note = Xaa is C or S
MIQMTINSTKVPAXXTSPVR

SEQ ID NO: 1003 - protein, 20 aa, synthetic construct
  REGION 1..20: note = GFR-binding peptide
  VARIANT 14..15: note = Xaa is C or S
MIQMTINSLAQPVXXPAASA

SEQ ID NO: 1004 - protein, 20 aa, synthetic construct
  REGION 1..20: note = GFR-binding peptide
  VARIANT 14..15: note = Xaa is C or S
MIQMTINSLDQSVXXPSASA

SEQ ID NO: 1005 - protein, 20 aa, synthetic construct
  REGION 1..20: note = GFR-binding peptide
  VARIANT 14..15: note = Xaa is C or S
MIQMTINSLDQPVXXPSASA

SEQ ID NO: 1006 - protein, 20 aa, synthetic construct
  REGION 1..20: note = GFR-binding peptide
  VARIANT 16: note = Xaa is C or S
MIQMTINSHHVRSPQXKVSS

SEQ ID NO: 1007 - protein, 20 aa, synthetic construct
  REGION 1..20: note = GFR-binding peptide
  VARIANT 16: note = Xaa is C or S
MIQMTINSLQVQTPRXQVNR

SEQ ID NO: 1008 - protein, 20 aa, synthetic construct
  REGION 1..20: note = GFR-binding peptide
  VARIANT 16: note = Xaa is C or S
VKAVKVSRLQVRSPRXQVNR

SEQ ID NO: 1009 - protein, 20 aa, synthetic construct
  REGION 1..20: note = GFR-binding peptide
  VARIANT 14..15: note = Xaa is C or S
VKAVKVSRLETPVXXAKPIK

SEQ ID NO: 1010 - protein, 20 aa, synthetic construct
  REGION 1..20: note = GFR-binding peptide
  VARIANT 14..15: note = Xaa is C or S
VKAVKVSRMKEPVXXPEPIG

SEQ ID NO: 1011 - protein, 20 aa, synthetic construct
  REGION 1..20: note = GFR-binding peptide
  VARIANT 14..15: note = Xaa is C or S
VKAVKVSRLKTPAXXPKPVY

SEQ ID NO: 1012 - protein, 20 aa, synthetic construct
  REGION 1..20: note = GFR-binding peptide
  VARIANT 14..15: note = Xaa is C or S
VKAVKVSRLKTPAXXAKPVA

SEQ ID NO: 1013 - protein, 20 aa, synthetic construct
  REGION 1..20: note = GFR-binding peptide
  VARIANT 14..15: note = Xaa is C or S
VKAVKVSRLKTPVXXAKGVK

SEQ ID NO: 1014 - protein, 20 aa, synthetic construct
  REGION 1..20: note = GFR-binding peptide
  VARIANT 14..15: note = Xaa is C or S
VKAVKVSRLKTPVXXAKSAK

SEQ ID NO: 1015 - protein, 20 aa, synthetic construct
  REGION 1..20: note = GFR-binding peptide
  VARIANT 14..15: note = Xaa is C or S
VKAVKVSRMKTPTXXPGASG

SEQ ID NO: 1016 - protein, 20 aa, synthetic construct
  REGION 1..20: note = GFR-binding peptide
  VARIANT 14..15: note = Xaa is C or S
VKAVKVSRLRAPVXXSAPAA

SEQ ID NO: 1017 - protein, 20 aa, synthetic construct
  REGION 1..20: note = GFR-binding peptide
  VARIANT 14..15: note = Xaa is C or S
VKAVKVSRLRTPVXXTPPTS

SEQ ID NO: 1018 - protein, 20 aa, synthetic construct
  REGION 1..20: note = GFR-binding peptide
  VARIANT 14..15: note = Xaa is C or S
VKAVKVSRLKTPAXXPKPVH

SEQ ID NO: 1019 - protein, 20 aa, synthetic construct
  REGION 1..20: note = GFR-binding peptide
  VARIANT 14..15: note = Xaa is C or S
VKAVKVSRTKVPAXXTSPVR

SEQ ID NO: 1020 - protein, 20 aa, synthetic construct
  REGION 1..20: note = GFR-binding peptide
  VARIANT 14..15: note = Xaa is C or S
VKAVKVSRLDQSVXXPSASA

SEQ ID NO: 1021 - protein, 20 aa, synthetic construct
  REGION 1..20: note = GFR-binding peptide
  VARIANT 14: note = Xaa is C or S
VKAVKVSRQGTPVXELGEDN

SEQ ID NO: 1022 - protein, 20 aa, synthetic construct
  REGION 1..20: note = GFR-binding peptide
  VARIANT 16: note = Xaa is C or S
VKAVKVSRLQVQTPRXQVNR

SEQ ID NO: 1023 - protein, 20 aa, synthetic construct
  REGION 1..20: note = GFR-binding peptide
  VARIANT 16: note = Xaa is C or S
IKRVQVPRHHVQTPQXKVSS

SEQ ID NO: 1024 - protein, 20 aa, synthetic construct
  REGION 1..20: note = GFR-binding peptide
  VARIANT 14..15: note = Xaa is C or S
IKRVQVPRLETPVXXAKPIK

SEQ ID NO: 1025 - protein, 20 aa, synthetic construct
  REGION 1..20: note = GFR-binding peptide
  VARIANT 14..15: note = Xaa is C or S
IKRVQVPRMKEPVXXPEPIG

SEQ ID NO: 1026 - protein, 20 aa, synthetic construct
  REGION 1..20: note = GFR-binding peptide
  VARIANT 14..15: note = Xaa is C or S
IKRVQVPRLETPVXXAKPIS

SEQ ID NO: 1027 - protein, 20 aa, synthetic construct
  REGION 1..20: note = GFR-binding peptide
  VARIANT 14: note = Xaa is C or S
IKRVQVPRLKTPAXTPKTVH

SEQ ID NO: 1028 - protein, 20 aa, synthetic construct
  REGION 1..20: note = GFR-binding peptide
  VARIANT 14..15: note = Xaa is C or S
IKRVQVPRLKTPAXXPKPVY

SEQ ID NO: 1029 - protein, 20 aa, synthetic construct
  REGION 1..20: note = GFR-binding peptide
  VARIANT 14..15: note = Xaa is C or S
IKRVQVPRLQTPAXXPKPVT

SEQ ID NO: 1030 - protein, 20 aa, synthetic construct
  REGION 1..20: note = GFR-binding peptide
  VARIANT 14..15: note = Xaa is C or S
IKRVQVPRLKTPAXXAKPVA

SEQ ID NO: 1031 - protein, 20 aa, synthetic construct
  REGION 1..20: note = GFR-binding peptide
  VARIANT 14..15: note = Xaa is C or S
IKRVQVPRLKTPVXXAKGVK

SEQ ID NO: 1032 - protein, 20 aa, synthetic construct
  REGION 1..20: note = GFR-binding peptide
  VARIANT 14..15: note = Xaa is C or S
IKRVQVPRLKTPVXXAKSAK

SEQ ID NO: 1033 - protein, 20 aa, synthetic construct
  REGION 1..20: note = GFR-binding peptide
  VARIANT 14..15: note = Xaa is C or S
IKRVQVPRMKTPTXXPGASG

SEQ ID NO: 1034 - protein, 20 aa, synthetic construct
  REGION 1..20: note = GFR-binding peptide
  VARIANT 14..15: note = Xaa is C or S
IKRVQVPRLRAPVXXSAPAA

SEQ ID NO: 1035 - protein, 20 aa, synthetic construct
  REGION 1..20: note = GFR-binding peptide
  VARIANT 14..15: note = Xaa is C or S
IKRVQVPRLRTPVXXTPPTS

SEQ ID NO: 1036 - protein, 20 aa, synthetic construct
  REGION 1..20: note = GFR-binding peptide
  VARIANT 14..15: note = Xaa is C or S
IKRVQVPRLKTPAXXPKPVH

SEQ ID NO: 1037 - protein, 20 aa, synthetic construct
  REGION 1..20: note = GFR-binding peptide
  VARIANT 14..15: note = Xaa is C or S
IKRVQVPRTKVPAXXTSPVR

SEQ ID NO: 1038 - protein, 20 aa, synthetic construct
  REGION 1..20: note = GFR-binding peptide
  VARIANT 14..15: note = Xaa is C or S
IKRVQVPRLDQSVXXPSASA

SEQ ID NO: 1039 - protein, 20 aa, synthetic construct
  REGION 1..20: note = GFR-binding peptide
  VARIANT 14: note = Xaa is C or S
IKRVQVPRQGTPVXELGEDN

SEQ ID NO: 1040 - protein, 20 aa, synthetic construct
  REGION 1..20: note = GFR-binding peptide
  VARIANT 16: note = Xaa is C or S
IKRVQVPRHHVRSPQXKVSS

SEQ ID NO: 1041 - protein, 8 aa, synthetic construct
  REGION 1..8: note = GFR-binding peptide
LYLISIAS

SEQ ID NO: 1042 - protein, 8 aa, synthetic construct
  REGION 1..8: note = GFR-binding peptide
LYLVSIAS

SEQ ID NO: 1043 - protein, 8 aa, synthetic construct
  REGION 1..8: note = GFR-binding peptide
FFLMSLSS

SEQ ID NO: 1044 - protein, 8 aa, synthetic construct
  REGION 1..8: note = GFR-binding peptide
FFLVSLSS

SEQ ID NO: 1045 - protein, 8 aa, synthetic construct
  REGION 1..8: note = GFR-binding peptide
FYLMSIAN

SEQ ID NO: 1046 - protein, 8 aa, synthetic construct
  REGION 1..8: note = GFR-binding peptide
FYLISIAN

SEQ ID NO: 1047 - protein, 8 aa, synthetic construct
  REGION 1..8: note = GFR-binding peptide
YYLMSTAS

SEQ ID NO: 1048 - protein, 8 aa, synthetic construct
  REGION 1..8: note = GFR-binding peptide
YYLISTAS

SEQ ID NO: 1049 - protein, 8 aa, synthetic construct
  REGION 1..8: note = GFR-binding peptide
KYLMSIPS

SEQ ID NO: 1050 - protein, 8 aa, synthetic construct
  REGION 1..8: note = GFR-binding peptide
KYLISIPS

SEQ ID NO: 1051 - protein, 8 aa, synthetic construct
  REGION 1..8: note = GFR-binding peptide
LYLMSIPE

SEQ ID NO: 1052 - protein, 8 aa, synthetic construct
  REGION 1..8: note = GFR-binding peptide
LYLVSIPE

SEQ ID NO: 1053 - protein, 8 aa, synthetic construct
  REGION 1..8: note = GFR-binding peptide
FYLINIPS

SEQ ID NO: 1054 - protein, 8 aa, synthetic construct
  REGION 1..8: note = GFR-binding peptide
FYLVNIPS

SEQ ID NO: 1055 - protein, 8 aa, synthetic construct
  REGION 1..8: note = GFR-binding peptide
IYLMSIPS

SEQ ID NO: 1056 - protein, 8 aa, synthetic construct
  REGION 1..8: note = GFR-binding peptide
IYLVSIPS

SEQ ID NO: 1057 - protein, 8 aa, synthetic construct
  REGION 1..8: note = GFR-binding peptide
IFLMSIPS

SEQ ID NO: 1058 - protein, 8 aa, synthetic construct
  REGION 1..8: note = GFR-binding peptide
IFLVSIPS

SEQ ID NO: 1059 - protein, 8 aa, synthetic construct
  REGION 1..8: note = GFR-binding peptide
VYLISLPK

SEQ ID NO: 1060 - protein, 8 aa, synthetic construct
  REGION 1..8: note = GFR-binding peptide
VYLVSLPK

SEQ ID NO: 1061 - protein, 8 aa, synthetic construct
  REGION 1..8: note = GFR-binding peptide
YYVMPLPE

SEQ ID NO: 1062 - protein, 8 aa, synthetic construct
  REGION 1..8: note = GFR-binding peptide
YYVVPLPE

SEQ ID NO: 1063 - protein, 8 aa, synthetic construct
  REGION 1..8: note = GFR-binding peptide
YYLMTLPE

SEQ ID NO: 1064 - protein, 8 aa, synthetic construct
  REGION 1..8: note = GFR-binding peptide
YYLVTLPE

SEQ ID NO: 1065 - protein, 8 aa, synthetic construct
  REGION 1..8: note = GFR-binding peptide
MIQITINS

SEQ ID NO: 1066 - protein, 8 aa, synthetic construct
  REGION 1..8: note = GFR-binding peptide
MIQVTINS

SEQ ID NO: 1067 - protein, 8 aa, synthetic construct
  REGION 1..8: note = GFR-binding peptide
VKAMKVSR

SEQ ID NO: 1068 - protein, 8 aa, synthetic construct
  REGION 1..8: note = GFR-binding peptide
VKAIKVSR

SEQ ID NO: 1069 - protein, 8 aa, synthetic construct
  REGION 1..8: note = GFR-binding peptide
IKRMQVPR

SEQ ID NO: 1070 - protein, 8 aa, synthetic construct
  REGION 1..8: note = GFR-binding peptide
IKRIQVPR

SEQ ID NO: 1071 - protein, 20 aa, synthetic construct
  REGION 1..20: note = GFR-binding peptide
RVPSTSSVPTELSAISVLYL

SEQ ID NO: 1072 - protein, 20 aa, synthetic construct
  REGION 1..20: note = GFR-binding peptide
RVPSTSSVPTDLSSLSILFF

SEQ ID NO: 1073 - protein, 20 aa, synthetic construct
  REGION 1..20: note = GFR-binding peptide
AASKASSVPQQLSSLSTLFF

SEQ ID NO: 1074 - protein, 20 aa, synthetic construct
  REGION 1..20: note = GFR-binding peptide
RVPSTSSVPQQLNAISTLYF

SEQ ID NO: 1075 - protein, 20 aa, synthetic construct
  REGION 1..20: note = GFR-binding peptide
AASKASSSRVEESATSTLYY

SEQ ID NO: 1076 - protein, 20 aa, synthetic construct
  REGION 1..20: note = GFR-binding peptide
RVPSTSSAPVEESPISTLYI

SEQ ID NO: 1077 - protein, 20 aa, synthetic construct
  REGION 1..20: note = GFR-binding peptide
RVPSTSSTQVRLSPISMLFI

SEQ ID NO: 1078 - protein, 20 aa, synthetic construct
  REGION 1..20: note = GFR-binding peptide
AASKASSVPTKMEPISTLYL

SEQ ID NO: 1079 - protein, 20 aa, synthetic construct
  REGION 1..20: note = GFR-binding peptide
AASKASSAPTKMSPINILYF

SEQ ID NO: 1080 - protein, 20 aa, synthetic construct
  REGION 1..20: note = GFR-binding peptide
RVPSTSSTPTKMKPLSILYV

SEQ ID NO: 1081 - protein, 20 aa, synthetic construct
  REGION 1..20: note = GFR-binding peptide
KIPKASSVPEELEPLPTVYY

SEQ ID NO: 1082 - protein, 20 aa, synthetic construct
  REGION 1..20: note = GFR-binding peptide
KIPKASSTPTGQSNITMQIM

SEQ ID NO: 1083 - protein, 20 aa, synthetic construct
  REGION 1..20: note = GFR-binding peptide
KIPKASSTPTRLRSVKMAKV

SEQ ID NO: 1084 - protein, 20 aa, synthetic construct
  REGION 1..20: note = GFR-binding peptide
KIPKASSVPTKMRPVQMRKI

SEQ ID NO: 1085 - protein, 20 aa, synthetic construct
  REGION 1..20: note = GFR-binding peptide
AASKASSVPAKMRPVQTRKI

SEQ ID NO: 1086 - protein, 10 aa, synthetic construct
  REGION 1..10: note = Previously reported sequence
VEQLSNMVVK

SEQ ID NO: 1087 - protein, 22 aa, synthetic construct
  REGION 1..22: note = Previously reported sequence
PIIYYVGRNVRVEQLSNMVVRA

SEQ ID NO: 1088 - protein, 23 aa, synthetic construct
  REGION 1..23: note = Previously reported sequence
PIIYYVGRNVRVEQLSNMVVRRA

SEQ ID NO: 1089 - protein, 29 aa, synthetic construct
  REGION 1..29: note = Previously reported sequence
DPLPIIYYVGRNVRVEQLSNMVVRACKCS

SEQ ID NO: 1090 - protein, 19 aa, synthetic construct
  REGION 1..19: note = Previously reported sequence
ENVNLKKYRNMIVKSCGCH

SEQ ID NO: 1091 - protein, 15 aa, synthetic construct
  REGION 1..15: note = Previously reported sequence
TPTYSRPVQKAELTR

SEQ ID NO: 1092 - protein, 29 aa, synthetic construct
  REGION 1..29: note = Previously reported sequence
HIRSTTSSYVSLKSNITNRTIQTPTYSYT

SEQ ID NO: 1093 - protein, 38 aa, synthetic construct
  REGION 1..38: note = Previously reported sequence
LMDLARMPSCLRGERAVPQDTTGYFTWSSNITPLNFIF

SEQ ID NO: 1094 - protein, 19 aa, synthetic construct
  REGION 1..19: note = Previously reported sequence
NEVLRFCGIQVPEGDEPLT

SEQ ID NO: 1095 - protein, 21 aa, synthetic construct
  REGION 1..21: note = Previously reported sequence
LNEVLRFCGIQVPEGDEPLTY

SEQ ID NO: 1096 - protein, 25 aa, synthetic construct
  REGION 1..25: note = Previously reported sequence
MSRVLFEPLTFLQTGSGLPDEKTLG

SEQ ID NO: 1097 - protein, 17 aa, synthetic construct
  REGION 1..17: note = Previously reported sequence
IKSPARHSAPTHQEPLP

SEQ ID NO: 1098 - protein, 21 aa, synthetic construct
  REGION 1..21: note = Previously reported sequence
NPGASASPCCVSQDLEPLPIL

SEQ ID NO: 1099 - protein, 26 aa, synthetic construct
  REGION 1..26: note = Previously reported sequence
SHQSAGDSIKSPARHSAPTHQEPLPD

SEQ ID NO: 1100 - protein, 16 aa, synthetic construct
  REGION 1..16: note = Previously reported sequence
PNYSVPAGNKPLSERE

SEQ ID NO: 1101 - protein, 23 aa, synthetic construct
  REGION 1..23: note = Previously reported sequence
TKPLSSLLFPNWNTTTTPTPPRP

SEQ ID NO: 1102 - protein, 23 aa, synthetic construct
  REGION 1..23: note = Previously reported sequence
CVTKPLSSLLFPNWNTTTTPTPP

SEQ ID NO: 1103 - protein, 21 aa, synthetic construct
  REGION 1..21: note = Previously reported sequence
VGAAWWLREQGSPINTLAVPA

SEQ ID NO: 1104 - protein, 38 aa, synthetic construct
  REGION 1..38: note = Previously reported sequence
MQCRELVTQVTEEPISQTEDGEEQESTTTPRLKGQKKE

SEQ ID NO: 1105 - protein, 36 aa, synthetic construct
  REGION 1..36: note = Previously reported sequence
VPTKLEPISVLYKDDMGVPTLKYHYEGMAVSECGCR

SEQ ID NO: 1106 - protein, 36 aa, synthetic construct
  REGION 1..36: note = Previously reported sequence
SPISILVVPELDASLPEKRPSLDGFEALLVYNAPKA

SEQ ID NO: 1107 - protein, 37 aa, synthetic construct
  REGION 1..37: note = Previously reported sequence
  VARIANT 3: note = misc_feature - Xaa can be any naturally occurring amino acid
  VARIANT 9: note = misc_feature - Xaa can be any naturally occurring amino acid
  VARIANT 18: note = misc_feature - Xaa can be any naturally occurring amino acid
TLXPIVSSXNPSPISFRXIKILLHDLEVVPFPKSRVR

SEQ ID NO: 1108 - protein, 35 aa, synthetic construct
  REGION 1..35: note = Previously reported sequence
VPTKLSPISILYLDKGVVTYKFKYEGMSVAECGCR

SEQ ID NO: 1109 - protein, 36 aa, synthetic construct
  REGION 1..36: note = Previously reported sequence
VPTKLSPISILYKDDMGVPTYKFKYEGMSVAECGCR

SEQ ID NO: 1110 - protein, 31 aa, synthetic construct
  REGION 1..31: note = Previously reported sequence
VPTELSPISLLYLDEFEKVTLKNYQDMVVDG

SEQ ID NO: 1111 - protein, 10 aa, synthetic construct
  REGION 1..10: note = Previously reported sequence
TPTVVSATSL

SEQ ID NO: 1112 - protein, 17 aa, synthetic construct
  REGION 1..17: note = Previously reported sequence
SATSRLALSDVPAELAA

SEQ ID NO: 1113 - protein, 23 aa, synthetic construct
  REGION 1..23: note = Previously reported sequence
LGIAAIIFLQQVPAAFSATSPPG

SEQ ID NO: 1114 - protein, 33 aa, synthetic construct
  REGION 1..33: note = Previously reported sequence
SVPAVCSATSATGPYSSVTVTSWPSIVATGGTT

SEQ ID NO: 1115 - protein, 33 aa, synthetic construct
  REGION 1..33: note = Previously reported sequence
SVPAVCSATSATGPYSTATNTVWPSIVATGGTT

SEQ ID NO: 1116 - protein, 33 aa, synthetic construct
  REGION 1..33: note = Previously reported sequence
SSVPAVCSATSATGPYSSGSVEVTFDVYATTVY

SEQ ID NO: 1117 - protein, 33 aa, synthetic construct
  REGION 1..33: note = Previously reported sequence
SSVPAVCSATSATGPYSTATNTVWFDVYATTVY

SEQ ID NO: 1118 - protein, 49 aa, synthetic construct
  REGION 1..49: note = Previously reported sequence
VHLLKPHAVPKACCAPTKLSATSVLYYDSSNNVILRKHRNMVVRACGCH

SEQ ID NO: 1119 - protein, 23 aa, synthetic construct
  REGION 1..23: note = Previously reported sequence
ANINKDRDNVPAATSSLSKAYNP

SEQ ID NO: 1120 - protein, 29 aa, synthetic construct
  REGION 1..29: note = Previously reported sequence
SFRTARANAPTGRSSLSGEKEQQEASTHS

SEQ ID NO: 1121 - protein, 48 aa, synthetic construct
  REGION 1..48: note = Previously reported sequence
DKPEESSSTPTHAQCICSSLSEAIVSSVLSTRLVLSQISLTRAKRAFE

SEQ ID NO: 1122 - protein, 50 aa, synthetic construct
  REGION 1..50: note = Previously reported sequence
  VARIANT 35: note = misc_feature - Xaa can be any naturally occurring amino acid
  VARIANT 38: note = misc_feature - Xaa can be any naturally occurring amino acid
KGSEYEKLVVSGITQVYQSSLSWHGCKSCCEVQVXNLXILIRLYDVHYYN

SEQ ID NO: 1123 - protein, 50 aa, synthetic construct
  REGION 1..50: note = Previously reported sequence
MALPQPRGSSLSKAPVVVAPCMALKRVNIRSIVFEVLKTMNQNCIHETPN

SEQ ID NO: 1124 - protein, 36 aa, synthetic construct
  REGION 1..36: note = Previously reported sequence
MAAQDEWRDAITLTMGRDLKKVPQHLNAISVIDPVT

SEQ ID NO: 1125 - protein, 42 aa, synthetic construct
  REGION 1..42: note = Previously reported sequence
LSLLAPPEPVWNHETSYGSDCHVPTNVNAISKMIDKSNHQTG

SEQ ID NO: 1126 - protein, 31 aa, synthetic construct
  REGION 1..31: note = Previously reported sequence
APTKLNAISVLYFDDSSNVILKKYRNMIVKS

SEQ ID NO: 1127 - protein, 11 aa, synthetic construct
  REGION 1..11: note = Previously reported sequence
APTQLSAISVL

SEQ ID NO: 1128 - protein, 18 aa, synthetic construct
  REGION 1..18: note = Previously reported sequence
FDSRVLKSAISFKENIIF

SEQ ID NO: 1129 - protein, 18 aa, synthetic construct
  REGION 1..18: note = Previously reported sequence
KIPKPSSAPTELSAISMC

SEQ ID NO: 1130 - protein, 18 aa, synthetic construct
  REGION 1..18: note = Previously reported sequence
CPKPSSAPTELSAISMLL

SEQ ID NO: 1131 - protein, 18 aa, synthetic construct
  REGION 1..18: note = Previously reported sequence
TCCVPELSAISMLYLDEN

SEQ ID NO: 1132 - protein, 19 aa, synthetic construct
  REGION 1..19: note = Previously reported sequence
KIPKPSSAPTELSAISMLC

SEQ ID NO: 1133 - protein, 20 aa, synthetic construct
  REGION 1..20: note = Previously reported sequence
KIPKPSSAPTELSAISMLYC

SEQ ID NO: 1134 - protein, 20 aa, synthetic construct
  REGION 1..20: note = Previously reported sequence
CIPKPSSAPTELSAISMLYL

SEQ ID NO: 1135 - protein, 21 aa, synthetic construct
  REGION 1..21: note = Previously reported sequence
CKIPKPSSAPTELSAISMLYL

SEQ ID NO: 1136 - protein, 22 aa, synthetic construct
  REGION 1..22: note = Previously reported sequence
AETLHTLGLSAPVIESAISDAI

SEQ ID NO: 1137 - protein, 33 aa, synthetic construct
  REGION 1..33: note = Previously reported sequence
MRTESTPTTASAISYECLWSPPSNEAAKLHFDS

SEQ ID NO: 1138 - protein, 47 aa, synthetic construct
  REGION 1..47: note = Previously reported sequence
SRVLPIVVQGYVPVQDTKFLGIYYVIGPIIARVILSSSSAISSLNKS

SEQ ID NO: 1139 - protein, 37 aa, synthetic construct
  REGION 1..37: note = Previously reported sequence
CCAPTELSAISVLYFDDSSNVILKKYRNMVVRACGCR

SEQ ID NO: 1140 - protein, 37 aa, synthetic construct
  REGION 1..37: note = Previously reported sequence
CCAPTQLSAISVLYFDDSSNVILKKYRNMVVRACGCR

SEQ ID NO: 1141 - protein, 39 aa, synthetic construct
  REGION 1..39: note = Previously reported sequence
KPCCAPTQLSAISVLYFDDSSNVILKKYRNMVVRACGCR

SEQ ID NO: 1142 - protein, 39 aa, synthetic construct
  REGION 1..39: note = Previously reported sequence
KPCCAPTELSAISVLYFDDSSNVILKKYRNMVVRACGCR

SEQ ID NO: 1143 - protein, 20 aa, synthetic construct
  REGION 1..20: note = GFR-binding peptide
NDEGLESVPEDLSSLSVLFF

SEQ ID NO: 1144 - protein, 20 aa, synthetic construct
  REGION 1..20: note = GFR-binding peptide
RVPSTSSVPTGQSAISTLYL

SEQ ID NO: 1145 - protein, 20 aa, synthetic construct
  REGION 1..20: note = GFR-binding peptide
RVPSTSSAPTKMNAISMLYF

SEQ ID NO: 1146 - protein, 20 aa, synthetic construct
  REGION 1..20: note = GFR-binding peptide
GIPEPSSAPTELSATSILYY

SEQ ID NO: 1147 - protein, 20 aa, synthetic construct
  REGION 1..20: note = GFR-binding peptide
STPPTSSVPTELSPISTLYK

SEQ ID NO: 1148 - protein, 20 aa, synthetic construct
  REGION 1..20: note = GFR-binding peptide
GIPEPSSAPVDLKPLSTLYV

SEQ ID NO: 1149 - protein, 20 aa, synthetic construct
  REGION 1..20: note = GFR-binding peptide
AASKASSVPQEEEPLPMVYY

SEQ ID NO: 1150 - protein, 20 aa, synthetic construct
  REGION 1..20: note = GFR-binding peptide
KIPKASSVSQKMEPLTMLYY

SEQ ID NO: 1151 - protein, 20 aa, synthetic construct
  REGION 1..20: note = GFR-binding peptide
KIPKASSVPTGGSNITVQIM

SEQ ID NO: 1152 - protein, 20 aa, synthetic construct
  REGION 1..20: note = GFR-binding peptide
AASKASSSRVELRSVKIAKV

SEQ ID NO: 1153 - protein, 20 aa, synthetic construct
  REGION 1..20: note = GFR-binding peptide
KIPKASSTQVRLRPVQIRKI

SEQ ID NO: 1154 - protein, 20 aa, synthetic construct
  REGION 1..20: note = GFR-binding peptide
STPPTSSSRVQLSAISMLYL

SEQ ID NO: 1155 - protein, 20 aa, synthetic construct
  REGION 1..20: note = GFR-binding peptide
RVPSTSSTQVKMSAISMLYL

SEQ ID NO: 1156 - protein, 20 aa, synthetic construct
  REGION 1..20: note = GFR-binding peptide
GIPEPSSVSQEESSLSTLFF

SEQ ID NO: 1157 - protein, 20 aa, synthetic construct
  REGION 1..20: note = GFR-binding peptide
KIPKASSSRVRLSSLSTLFF

SEQ ID NO: 1158 - protein, 20 aa, synthetic construct
  REGION 1..20: note = GFR-binding peptide
AASKASSTPTDLNAISTLYF

SEQ ID NO: 1159 - protein, 20 aa, synthetic construct
  REGION 1..20: note = GFR-binding peptide
RVPSTSSTQVDLNAISVLYF

SEQ ID NO: 1160 - protein, 20 aa, synthetic construct
  REGION 1..20: note = GFR-binding peptide
GIPEPSSVSQELSATSMLYY

SEQ ID NO: 1161 - protein, 20 aa, synthetic construct
  REGION 1..20: note = GFR-binding peptide
KIPKASSTQVGQSATSILYY

SEQ ID NO: 1162 - protein, 20 aa, synthetic construct
  REGION 1..20: note = GFR-binding peptide
STPPTSSAPVGQSPISMLYI

SEQ ID NO: 1163 - protein, 20 aa, synthetic construct
  REGION 1..20: note = GFR-binding peptide
KIPKASSTPTRLSPISMLFI

SEQ ID NO: 1164 - protein, 20 aa, synthetic construct
  REGION 1..20: note = GFR-binding peptide
GIPEPSSAPTRLEPISMLYL

SEQ ID NO: 1165 - protein, 20 aa, synthetic construct
  REGION 1..20: note = GFR-binding peptide
KIPKASSVSQQLEPISTLYL

SEQ ID NO: 1166 - protein, 20 aa, synthetic construct
  REGION 1..20: note = GFR-binding peptide
STPPTSSVPTEVSPINTLYF

SEQ ID NO: 1167 - protein, 20 aa, synthetic construct
  REGION 1..20: note = GFR-binding peptide
AASKASSSRVKMSPINVLYF

SEQ ID NO: 1168 - protein, 20 aa, synthetic construct
  REGION 1..20: note = GFR-binding peptide
KIPKASSVPTKMKPLSVLYV

SEQ ID NO: 1169 - protein, 20 aa, synthetic construct
  REGION 1..20: note = GFR-binding peptide
RVPSTSSAPTKMKPLSMLYV

SEQ ID NO: 1170 - protein, 20 aa, synthetic construct
  REGION 1..20: note = GFR-binding peptide
STPPTSSVSQKMKPLSILYV

SEQ ID NO: 1171 - protein, 20 aa, synthetic construct
  REGION 1..20: note = GFR-binding peptide
KIPKASSVPAQLEPLPIVYY

SEQ ID NO: 1172 - protein, 20 aa, synthetic construct
  REGION 1..20: note = GFR-binding peptide
GIPEPSSAPVGQEPLPMVYY

SEQ ID NO: 1173 - protein, 20 aa, synthetic construct
  REGION 1..20: note = GFR-binding peptide
RVPSTSSVPEKMEPLTMLYY

SEQ ID NO: 1174 - protein, 20 aa, synthetic construct
  REGION 1..20: note = GFR-binding peptide
GIPEPSSAPVEEEPLTTLYY

SEQ ID NO: 1175 - protein, 20 aa, synthetic construct
  REGION 1..20: note = GFR-binding peptide
STPPTSSTPTKMSNITTQIM

SEQ ID NO: 1176 - protein, 20 aa, synthetic construct
  REGION 1..20: note = GFR-binding peptide
RVPSTSSVPAEESNITVQIM

SEQ ID NO: 1177 - protein, 20 aa, synthetic construct
  REGION 1..20: note = GFR-binding peptide
AASKASSVPQRLRSVKVAKV

SEQ ID NO: 1178 - protein, 20 aa, synthetic construct
  REGION 1..20: note = GFR-binding peptide
KIPKASSTQVRLRSVKTAKV

SEQ ID NO: 1179 - protein, 20 aa, synthetic construct
  REGION 1..20: note = GFR-binding peptide
AASKASSVPEKMRPVQTRKI

SEQ ID NO: 1180 - protein, 20 aa, synthetic construct
  REGION 1..20: note = GFR-binding peptide
GIPEPSSAPVDMRPVQIRKI

SEQ ID NO: 1181 - protein, 20 aa, synthetic construct
  REGION 1..20: note = GFR-binding peptide
CSAAPSSVPTALSAISMLYL

SEQ ID NO: 1182 - protein, 13 aa, synthetic construct
  REGION 1..13: note = GFR-binding peptide
APTQLSAISVLYL

SEQ ID NO: 1183 - protein, 18 aa, synthetic construct
  REGION 1..18: note = GFR-binding peptide
  VARIANT 4..5: note = Xaa is C or S
PKAXXVPTELSPISMLYK

SEQ ID NO: 1184 - protein, 10 aa, synthetic construct
  REGION 1..10: note = GFR-binding peptide
ALSATSILYY

SEQ ID NO: 1185 - protein, 10 aa, synthetic construct
  REGION 1..10: note = GFR-binding peptide
ELSPISMLYK

SEQ ID NO: 1186 - protein, 18 aa, synthetic construct
  REGION 1..18: note = GFR-binding peptide
  VARIANT 4..5: note = Xaa is C or S
ASPXXVSQDLSPISILYK

SEQ ID NO: 1187 - protein, 19 aa, synthetic construct
  REGION 1..19: note = GFR-binding peptide
  VARIANT 5..6: note = Xaa is C or S
SASPXXVSQDLSATSILYY

SEQ ID NO: 1188 - protein, 19 aa, synthetic construct
  REGION 1..19: note = GFR-binding peptide
  VARIANT 5..6: note = Xaa is C or S
SASPXXVSQDLSAISILYL

SEQ ID NO: 1189 - protein, 11 aa, synthetic construct
  REGION 1..11: note = GFR-binding peptide
QDLNAISILYF

SEQ ID NO: 1190 - protein, 13 aa, synthetic construct
  REGION 1..13: note = GFR-binding peptide
VPQALSAISILYL

SEQ ID NO: 1191 - protein, 10 aa, synthetic construct
  REGION 1..10: note = GFR-binding peptide
ALSAISILYL

SEQ ID NO: 1192 - protein, 16 aa, synthetic construct
  REGION 1..16: note = GFR-binding peptide
  VARIANT 2..3: note = Xaa is C or S
PXXAPTQLSATSVLYY

SEQ ID NO: 1193 - protein, 16 aa, synthetic construct
  REGION 1..16: note = GFR-binding peptide
  VARIANT 2..3: note = Xaa is C or S
PXXVPQALSATSILYY

SEQ ID NO: 1194 - protein, 12 aa, synthetic construct
  REGION 1..12: note = GFR-binding peptide
PQALSPISILYK

SEQ ID NO: 1195 - protein, 13 aa, synthetic construct
  REGION 1..13: note = GFR-binding peptide
VSQDLSATSILYY

SEQ ID NO: 1196 - protein, 10 aa, synthetic construct
  REGION 1..10: note = GFR-binding peptide
ELNAISMLYF

SEQ ID NO: 1197 - protein, 18 aa, synthetic construct
  REGION 1..18: note = GFR-binding peptide
  VARIANT 4..5: note = Xaa is C or S
ASPXXVPQDLSATSILYY

SEQ ID NO: 1198 - protein, 18 aa, synthetic construct
  REGION 1..18: note = GFR-binding peptide
  VARIANT 4..5: note = Xaa is C or S
AAPXXVPQALSATSILYY

SEQ ID NO: 1199 - protein, 12 aa, synthetic construct
  REGION 1..12: note = GFR-binding peptide
SQDLSAISILYL

SEQ ID NO: 1200 - protein, 18 aa, synthetic construct
  REGION 1..18: note = GFR-binding peptide
  VARIANT 4..5: note = Xaa is C or S
PKAXXAPTKLNAISVLYF

SEQ ID NO: 1201 - protein, 17 aa, synthetic construct
  REGION 1..17: note = GFR-binding peptide
  VARIANT 2: note = Xaa is C or S
QXRPTQVQLSPISVLYK

SEQ ID NO: 1202 - protein, 18 aa, synthetic construct
  REGION 1..18: note = GFR-binding peptide
  VARIANT 3: note = Xaa is C or S
VQXRPTQVQLSAISVLYL

SEQ ID NO: 1203 - protein, 16 aa, synthetic construct
  REGION 1..16: note = GFR-binding peptide
  VARIANT 2..3: note = Xaa is C or S
PXXVPQALSAISILYL

SEQ ID NO: 1204 - protein, 12 aa, synthetic construct
  REGION 1..12: note = GFR-binding peptide
PTQLSPISVLYK

SEQ ID NO: 1205 - protein, 16 aa, synthetic construct
  REGION 1..16: note = GFR-binding peptide
  VARIANT 2..3: note = Xaa is C or S
PXXAPTQLSAISVLYL

SEQ ID NO: 1206 - protein, 17 aa, synthetic construct
  REGION 1..17: note = GFR-binding peptide
  VARIANT 2: note = Xaa is C or S
QXRPTQVQLSAISVLYL

SEQ ID NO: 1207 - protein, 19 aa, synthetic construct
  REGION 1..19: note = GFR-binding peptide
  VARIANT 5..6: note = Xaa is C or S
VPKPXXAPTQLSATSVLYY

SEQ ID NO: 1208 - protein, 13 aa, synthetic construct
  REGION 1..13: note = GFR-binding peptide
VSQDLSAISILYL

SEQ ID NO: 1209 - protein, 14 aa, synthetic construct
  REGION 1..14: note = GFR-binding peptide
PTQVQLNAISVLYF

SEQ ID NO: 1210 - protein, 17 aa, synthetic construct
  REGION 1..17: note = GFR-binding peptide
  VARIANT 3..4: note = Xaa is C or S
SPXXVPQDLNAISILYF

SEQ ID NO: 1211 - protein, 16 aa, synthetic construct
  REGION 1..16: note = GFR-binding peptide
  VARIANT 2..3: note = Xaa is C or S
AXXAPTKLSAISVLYL

SEQ ID NO: 1212 - protein, 18 aa, synthetic construct
  REGION 1..18: note = GFR-binding peptide
  VARIANT 4..5: note = Xaa is C or S
ASPXXVPQDLSAISILYL

SEQ ID NO: 1213 - protein, 15 aa, synthetic construct
  REGION 1..15: note = GFR-binding peptide
  VARIANT 1..2: note = Xaa is C or S
XXVPQALSAISILYL

SEQ ID NO: 1214 - protein, 18 aa, synthetic construct
  REGION 1..18: note = GFR-binding peptide
  VARIANT 4..5: note = Xaa is C or S
GKAXXVPTKLSAISVLYL

SEQ ID NO: 1215 - protein, 11 aa, synthetic construct
  REGION 1..11: note = GFR-binding peptide
QDLSPISILYK

SEQ ID NO: 1216 - protein, 18 aa, synthetic construct
  REGION 1..18: note = GFR-binding peptide
  VARIANT 3: note = Xaa is C or S
VQXRPTQVQLSATSVLYY

SEQ ID NO: 1217 - protein, 9 aa, synthetic construct
  REGION 1..9: note = GFR-binding peptide
LSATSMLYY

SEQ ID NO: 1218 - protein, 18 aa, synthetic construct
  REGION 1..18: note = GFR-binding peptide
  VARIANT 4..5: note = Xaa is C or S
PKAXXVPTELNAISMLYF

SEQ ID NO: 1219 - protein, 13 aa, synthetic construct
  REGION 1..13: note = GFR-binding peptide
VPQALSATSILYY

SEQ ID NO: 1220 - protein, 15 aa, synthetic construct
  REGION 1..15: note = GFR-binding peptide
  VARIANT 2: note = Xaa is C or S
TXAPTKLSATSVLYY

SEQ ID NO: 1221 - protein, 11 aa, synthetic construct
  REGION 1..11: note = GFR-binding peptide
TELSPISMLYK

SEQ ID NO: 1222 - protein, 17 aa, synthetic construct
  REGION 1..17: note = GFR-binding peptide
  VARIANT 2: note = Xaa is C or S
QXRPTQVQLSATSVLYY

SEQ ID NO: 1223 - protein, 17 aa, synthetic construct
  REGION 1..17: note = GFR-binding peptide
  VARIANT 3..4: note = Xaa is C or S
APXXVPQALSPISILYK

SEQ ID NO: 1224 - protein, 18 aa, synthetic construct
  REGION 1..18: note = GFR-binding peptide
  VARIANT 4..5: note = Xaa is C or S
GKAXXVPTKLNAISVLYF

SEQ ID NO: 1225 - protein, 20 aa, synthetic construct
  REGION 1..20: note = GFR-binding peptide
  VARIANT 6..7: note = Xaa is C or S
SIPKAXXVPTELSATSMLYY

SEQ ID NO: 1226 - protein, 15 aa, synthetic construct
  REGION 1..15: note = GFR-binding peptide
  VARIANT 1..2: note = Xaa is C or S
XXVPQALSATSILYY

SEQ ID NO: 1227 - protein, 17 aa, synthetic construct
  REGION 1..17: note = GFR-binding peptide
  VARIANT 3..4: note = Xaa is C or S
KAXXVPTELNAISMLYF

SEQ ID NO: 1228 - protein, 17 aa, synthetic construct
  REGION 1..17: note = GFR-binding peptide
  VARIANT 3..4: note = Xaa is C or S
APXXVPQALNAISILYF

SEQ ID NO: 1229 - protein, 20 aa, synthetic construct
  REGION 1..20: note = GFR-binding peptide
  VARIANT 6..7: note = Xaa is C or S
TVPKPXXAPTQLSAISVLYL

SEQ ID NO: 1230 - protein, 18 aa, synthetic construct
  REGION 1..18: note = GFR-binding peptide
  VARIANT 4..5: note = Xaa is C or S
AAPXXVPQALSAISILYL

SEQ ID NO: 1231 - protein, 19 aa, synthetic construct
  REGION 1..19: note = GFR-binding peptide
  VARIANT 5..6: note = Xaa is C or S
VPKPXXAPTQLSAISVLYL

SEQ ID NO: 1232 - protein, 11 aa, synthetic construct
  REGION 1..11: note = GFR-binding peptide
TELNAISMLYF

SEQ ID NO: 1233 - protein, 17 aa, synthetic construct
  REGION 1..17: note = GFR-binding peptide
  VARIANT 3..4: note = Xaa is C or S
KAXXVPTELSPISMLYK

SEQ ID NO: 1234 - protein, 12 aa, synthetic construct
  REGION 1..12: note = GFR-binding peptide
SQDLSATSILYY

SEQ ID NO: 1235 - protein, 14 aa, synthetic construct
  REGION 1..14: note = GFR-binding peptide
  VARIANT 1: note = Xaa is C or S
XVPQALSAISILYL

SEQ ID NO: 1236 - protein, 20 aa, synthetic construct
  REGION 1..20: note = GFR-binding peptide
  VARIANT 7: note = Xaa is C or S
HVTKPTXAPTKLSAISVLYL

SEQ ID NO: 1237 - protein, 18 aa, synthetic construct
  REGION 1..18: note = GFR-binding peptide
  VARIANT 4..5: note = Xaa is C or S
ASPXXVPQDLSPISILYK

SEQ ID NO: 1238 - protein, 13 aa, synthetic construct
  REGION 1..13: note = GFR-binding peptide
APTKLSAISVLYL

SEQ ID NO: 1239 - protein, 19 aa, synthetic construct
  REGION 1..19: note = GFR-binding peptide
  VARIANT 5..6: note = Xaa is C or S
SAAPXXVPQALSATSILYY

SEQ ID NO: 1240 - protein, 17 aa, synthetic construct
  REGION 1..17: note = GFR-binding peptide
  VARIANT 3..4: note = Xaa is C or S
KAXXAPTKLNAISVLYF

SEQ ID NO: 1241 - protein, 17 aa, synthetic construct
  REGION 1..17: note = GFR-binding peptide
  VARIANT 3..4: note = Xaa is C or S
SPXXVPQDLSPISILYK

SEQ ID NO: 1242 - protein, 19 aa, synthetic construct
  REGION 1..19: note = GFR-binding peptide
  VARIANT 5..6: note = Xaa is C or S
SASPXXVPQDLSATSILYY

SEQ ID NO: 1243 - protein, 16 aa, synthetic construct
  REGION 1..16: note = GFR-binding peptide
  VARIANT 1: note = Xaa is C or S
XRPTQVQLSAISVLYL

SEQ ID NO: 1244 - protein, 19 aa, synthetic construct
  REGION 1..19: note = GFR-binding peptide
  VARIANT 5..6: note = Xaa is C or S
VPKAXXAPTKLSAISVLYL

SEQ ID NO: 1245 - protein, 16 aa, synthetic construct
  REGION 1..16: note = GFR-binding peptide
  VARIANT 2..3: note = Xaa is C or S
PXXVPQALSPISILYK

SEQ ID NO: 1246 - protein, 20 aa, synthetic construct
  REGION 1..20: note = GFR-binding peptide
  VARIANT 5: note = Xaa is C or S
RNVQXRPTQVQLNAISVLYF

SEQ ID NO: 1247 - protein, 16 aa, synthetic construct
  REGION 1..16: note = GFR-binding peptide
  VARIANT 2..3: note = Xaa is C or S
PXXAPTKLSATSVLYY

SEQ ID NO: 1248 - protein, 19 aa, synthetic construct
  REGION 1..19: note = GFR-binding peptide
  VARIANT 5..6: note = Xaa is C or S
SASPXXVPQDLSAISILYL

SEQ ID NO: 1249 - protein, 17 aa, synthetic construct
  REGION 1..17: note = GFR-binding peptide
  VARIANT 3..4: note = Xaa is C or S
KAXXVPTKLNAISVLYF

SEQ ID NO: 1250 - protein, 15 aa, synthetic construct
  REGION 1..15: note = GFR-binding peptide
RPTQVQLNAISVLYF

SEQ ID NO: 1251 - protein, 19 aa, synthetic construct
  REGION 1..19: note = GFR-binding peptide
  VARIANT 5..6: note = Xaa is C or S
SASPXXVSQDLSPISILYK

SEQ ID NO: 1252 - protein, 17 aa, synthetic construct
  REGION 1..17: note = GFR-binding peptide
  VARIANT 4: note = Xaa is C or S
KPTXAPTKLSAISVLYL

SEQ ID NO: 1253 - protein, 15 aa, synthetic construct
  REGION 1..15: note = GFR-binding peptide
  VARIANT 1..2: note = Xaa is C or S
XXVPQDLNAISILYF

SEQ ID NO: 1254 - protein, 14 aa, synthetic construct
  REGION 1..14: note = GFR-binding peptide
  VARIANT 1: note = Xaa is C or S
XVPTELSPISMLYK

SEQ ID NO: 1255 - protein, 17 aa, synthetic construct
  REGION 1..17: note = GFR-binding peptide
  VARIANT 3..4: note = Xaa is C or S
SPXXVSQDLSATSILYY

SEQ ID NO: 1256 - protein, 11 aa, synthetic construct
  REGION 1..11: note = GFR-binding peptide
TKLSAISVLYL

SEQ ID NO: 1257 - protein, 11 aa, synthetic construct
  REGION 1..11: note = GFR-binding peptide
QALSATSILYY

SEQ ID NO: 1258 - protein, 11 aa, synthetic construct
  REGION 1..11: note = GFR-binding peptide
QDLSATSILYY

SEQ ID NO: 1259 - protein, 12 aa, synthetic construct
  REGION 1..12: note = GFR-binding peptide
PTELSATSMLYY

SEQ ID NO: 1260 - protein, 20 aa, synthetic construct
  REGION 1..20: note = GFR-binding peptide
  VARIANT 6..7: note = Xaa is C or S
KIPKAXXVPTELNAISMLYF

SEQ ID NO: 1261 - protein, 18 aa, synthetic construct
  REGION 1..18: note = GFR-binding peptide
  VARIANT 3: note = Xaa is C or S
VQXRPTQVQLNAISVLYF

SEQ ID NO: 1262 - protein, 17 aa, synthetic construct
  REGION 1..17: note = GFR-binding peptide
  VARIANT 3..4: note = Xaa is C or S
KPXXAPTKLSAISVLYL

SEQ ID NO: 1263 - protein, 18 aa, synthetic construct
  REGION 1..18: note = GFR-binding peptide
  VARIANT 4..5: note = Xaa is C or S
PKAXXAPTKLSAISVLYL

SEQ ID NO: 1264 - protein, 12 aa, synthetic construct
  REGION 1..12: note = GFR-binding peptide
SQDLNAISILYF

SEQ ID NO: 1265 - protein, 11 aa, synthetic construct
  REGION 1..11: note = GFR-binding peptide
VQLNAISVLYF

SEQ ID NO: 1266 - protein, 10 aa, synthetic construct
  REGION 1..10: note = GFR-binding peptide
ALNAISILYF

SEQ ID NO: 1267 - protein, 15 aa, synthetic construct
  REGION 1..15: note = GFR-binding peptide
  VARIANT 1..2: note = Xaa is C or S
XXVPQALNAISILYF

SEQ ID NO: 1268 - protein, 13 aa, synthetic construct
  REGION 1..13: note = GFR-binding peptide
VPQDLSAISILYL

SEQ ID NO: 1269 - protein, 13 aa, synthetic construct
  REGION 1..13: note = GFR-binding peptide
VPQALNAISILYF

SEQ ID NO: 1270 - protein, 12 aa, synthetic construct
  REGION 1..12: note = GFR-binding peptide
PTELSPISMLYK

SEQ ID NO: 1271 - protein, 14 aa, synthetic construct
  REGION 1..14: note = GFR-binding peptide
  VARIANT 1: note = Xaa is C or S
XVPTELSATSMLYY

SEQ ID NO: 1272 - protein, 14 aa, synthetic construct
  REGION 1..14: note = GFR-binding peptide
  VARIANT 1: note = Xaa is C or S
XVPQDLSAISILYL

SEQ ID NO: 1273 - protein, 9 aa, synthetic construct
  REGION 1..9: note = GFR-binding peptide
LSPISMLYK

SEQ ID NO: 1274 - protein, 15 aa, synthetic construct
  REGION 1..15: note = GFR-binding peptide
  VARIANT 2: note = Xaa is C or S
TXAPTKLSPISVLYK

SEQ ID NO: 1275 - protein, 18 aa, synthetic construct
  REGION 1..18: note = GFR-binding peptide
  VARIANT 4..5: note = Xaa is C or S
PKPXXAPTKLSAISVLYL

SEQ ID NO: 1276 - protein, 14 aa, synthetic construct
  REGION 1..14: note = GFR-binding peptide
  VARIANT 1: note = Xaa is C or S
XVSQDLNAISILYF

SEQ ID NO: 1277 - protein, 16 aa, synthetic construct
  REGION 1..16: note = GFR-binding peptide
  VARIANT 2..3: note = Xaa is C or S
PXXVPQDLSATSILYY

SEQ ID NO: 1278 - protein, 18 aa, synthetic construct
  REGION 1..18: note = GFR-binding peptide
  VARIANT 4..5: note = Xaa is C or S
GKAXXVPTKLSATSVLYY

SEQ ID NO: 1279 - protein, 15 aa, synthetic construct
  REGION 1..15: note = GFR-binding peptide
  VARIANT 1..2: note = Xaa is C or S
XXVPTELSPISMLYK

SEQ ID NO: 1280 - protein, 14 aa, synthetic construct
  REGION 1..14: note = GFR-binding peptide
  VARIANT 1: note = Xaa is C or S
XVPQDLNAISILYF

SEQ ID NO: 1281 - protein, 16 aa, synthetic construct
  REGION 1..16: note = GFR-binding peptide
  VARIANT 2..3: note = Xaa is C or S
PXXVSQDLSATSILYY

SEQ ID NO: 1282 - protein, 13 aa, synthetic construct
  REGION 1..13: note = GFR-binding peptide
VPQDLNAISILYF

SEQ ID NO: 1283 - protein, 20 aa, synthetic construct
  REGION 1..20: note = GFR-binding peptide
  VARIANT 6..7: note = Xaa is C or S
ASASPXXVPQDLSPISILYK

SEQ ID NO: 1284 - protein, 15 aa, synthetic construct
  REGION 1..15: note = GFR-binding peptide
  VARIANT 1..2: note = Xaa is C or S
XXVSQDLSATSILYY

SEQ ID NO: 1285 - protein, 19 aa, synthetic construct
  REGION 1..19: note = GFR-binding peptide
  VARIANT 5..6: note = Xaa is C or S
VGKAXXVPTKLNAISVLYF

SEQ ID NO: 1286 - protein, 15 aa, synthetic construct
  REGION 1..15: note = GFR-binding peptide
  VARIANT 1..2: note = Xaa is C or S
XXAPTKLSAISVLYL

SEQ ID NO: 1287 - protein, 16 aa, synthetic construct
  REGION 1..16: note = GFR-binding peptide
  VARIANT 2..3: note = Xaa is C or S
AXXVPTKLNAISVLYF

SEQ ID NO: 1288 - protein, 9 aa, synthetic construct
  REGION 1..9: note = GFR-binding peptide
LSAISILYL

SEQ ID NO: 1289 - protein, 16 aa, synthetic construct
  REGION 1..16: note = GFR-binding peptide
  VARIANT 2..3: note = Xaa is C or S
PXXVSQDLSPISILYK

SEQ ID NO: 1290 - protein, 10 aa, synthetic construct
  REGION 1..10: note = GFR-binding peptide
DLNAISILYF

SEQ ID NO: 1291 - protein, 18 aa, synthetic construct
  REGION 1..18: note = GFR-binding peptide
  VARIANT 4..5: note = Xaa is C or S
PKPXXAPTQLSAISVLYL

SEQ ID NO: 1292 - protein, 15 aa, synthetic construct
  REGION 1..15: note = GFR-binding peptide
  VARIANT 1..2: note = Xaa is C or S
XXAPTQLSAISVLYL

SEQ ID NO: 1293 - protein, 20 aa, synthetic construct
  REGION 1..20: note = GFR-binding peptide
  VARIANT 6..7: note = Xaa is C or S
ASAAPXXVPQALNAISILYF

SEQ ID NO: 1294 - protein, 13 aa, synthetic construct
  REGION 1..13: note = GFR-binding peptide
TQVQLSAISVLYL

SEQ ID NO: 1295 - protein, 19 aa, synthetic construct
  REGION 1..19: note = GFR-binding peptide
  VARIANT 6: note = Xaa is C or S
VTKPTXAPTKLSAISVLYL

SEQ ID NO: 1296 - protein, 20 aa, synthetic construct
  REGION 1..20: note = GFR-binding peptide
  VARIANT 6..7: note = Xaa is C or S
ASAAPXXVPQALSAISILYL

SEQ ID NO: 1297 - protein, 13 aa, synthetic construct
  REGION 1..13: note = GFR-binding peptide
TQVQLNAISVLYF

SEQ ID NO: 1298 - protein, 18 aa, synthetic construct
  REGION 1..18: note = GFR-binding peptide
  VARIANT 4..5: note = Xaa is C or S
ASPXXVSQDLNAISILYF

SEQ ID NO: 1299 - protein, 12 aa, synthetic construct
  REGION 1..12: note = GFR-binding peptide
PQALSAISILYL

SEQ ID NO: 1300 - protein, 16 aa, synthetic construct
  REGION 1..16: note = GFR-binding peptide
  VARIANT 2..3: note = Xaa is C or S
AXXVPTKLSAISVLYL

SEQ ID NO: 1301 - protein, 12 aa, synthetic construct
  REGION 1..12: note = GFR-binding peptide
PQALNAISILYF

SEQ ID NO: 1302 - protein, 12 aa, synthetic construct
  REGION 1..12: note = GFR-binding peptide
PQDLSAISILYL

SEQ ID NO: 1303 - protein, 19 aa, synthetic construct
  REGION 1..19: note = GFR-binding peptide
  VARIANT 4: note = Xaa is C or S
NVQXRPTQVQLNAISVLYF

SEQ ID NO: 1304 - protein, 12 aa, synthetic construct
  REGION 1..12: note = GFR-binding peptide
PTQLSATSVLYY

SEQ ID NO: 1305 - protein, 10 aa, synthetic construct
  REGION 1..10: note = GFR-binding peptide
ELSATSMLYY

SEQ ID NO: 1306 - protein, 18 aa, synthetic construct
  REGION 1..18: note = GFR-binding peptide
  VARIANT 5: note = Xaa is C or S
TKPTXAPTKLSAISVLYL

SEQ ID NO: 1307 - protein, 20 aa, synthetic construct
  REGION 1..20: note = GFR-binding peptide
  VARIANT 5: note = Xaa is C or S
RNVQXRPTQVQLSAISVLYL

SEQ ID NO: 1308 - protein, 19 aa, synthetic construct
  REGION 1..19: note = GFR-binding peptide
  VARIANT 5..6: note = Xaa is C or S
IPKAXXVPTELSATSMLYY

SEQ ID NO: 1309 - protein, 15 aa, synthetic construct
  REGION 1..15: note = GFR-binding peptide
RPTQVQLSAISVLYL

SEQ ID NO: 1310 - protein, 18 aa, synthetic construct
  REGION 1..18: note = GFR-binding peptide
  VARIANT 4..5: note = Xaa is C or S
ASPXXVSQDLSAISILYL

SEQ ID NO: 1311 - protein, 17 aa, synthetic construct
  REGION 1..17: note = GFR-binding peptide
  VARIANT 3..4: note = Xaa is C or S
KPXXAPTQLSAISVLYL

SEQ ID NO: 1312 - protein, 9 aa, synthetic construct
  REGION 1..9: note = GFR-binding peptide
LNAISILYF

SEQ ID NO: 1313 - protein, 17 aa, synthetic construct
  REGION 1..17: note = GFR-binding peptide
  VARIANT 3..4: note = Xaa is C or S
KAXXVPTKLSATSVLYY

SEQ ID NO: 1314 - protein, 17 aa, synthetic construct
  REGION 1..17: note = GFR-binding peptide
  VARIANT 3..4: note = Xaa is C or S
SPXXVSQDLSPISILYK

SEQ ID NO: 1315 - protein, 14 aa, synthetic construct
  REGION 1..14: note = GFR-binding peptide
  VARIANT 1: note = Xaa is C or S
XVPQALNAISILYF

SEQ ID NO: 1316 - protein, 17 aa, synthetic construct
  REGION 1..17: note = GFR-binding peptide
  VARIANT 3..4: note = Xaa is C or S
KAXXAPTKLSAISVLYL

SEQ ID NO: 1317 - protein, 10 aa, synthetic construct
  REGION 1..10: note = GFR-binding peptide
QLSAISVLYL

SEQ ID NO: 1318 - protein, 15 aa, synthetic construct
  REGION 1..15: note = GFR-binding peptide
  VARIANT 1..2: note = Xaa is C or S
XXAPTKLSPISVLYK

SEQ ID NO: 1319 - protein, 11 aa, synthetic construct
  REGION 1..11: note = GFR-binding peptide
VQLSAISVLYL

SEQ ID NO: 1320 - protein, 12 aa, synthetic construct
  REGION 1..12: note = GFR-binding peptide
QVQLSAISVLYL

SEQ ID NO: 1321 - protein, 16 aa, synthetic construct
  REGION 1..16: note = GFR-binding peptide
  VARIANT 2..3: note = Xaa is C or S
PXXAPTKLSPISVLYK

SEQ ID NO: 1322 - protein, 19 aa, synthetic construct
  REGION 1..19: note = GFR-binding peptide
  VARIANT 5..6: note = Xaa is C or S
SAAPXXVPQALSPISILYK

SEQ ID NO: 1323 - protein, 19 aa, synthetic construct
  REGION 1..19: note = GFR-binding peptide
  VARIANT 5..6: note = Xaa is C or S
SAAPXXVPQALNAISILYF

SEQ ID NO: 1324 - protein, 13 aa, synthetic construct
  REGION 1..13: note = GFR-binding peptide
VPQDLSPISILYK

SEQ ID NO: 1325 - protein, 19 aa, synthetic construct
  REGION 1..19: note = GFR-binding peptide
  VARIANT 5..6: note = Xaa is C or S
IPKAXXVPTELSPISMLYK

SEQ ID NO: 1326 - protein, 10 aa, synthetic construct
  REGION 1..10: note = GFR-binding peptide
QLSATSVLYY

SEQ ID NO: 1327 - protein, 19 aa, synthetic construct
  REGION 1..19: note = GFR-binding peptide
  VARIANT 4: note = Xaa is C or S
NVQXRPTQVQLSATSVLYY

SEQ ID NO: 1328 - protein, 14 aa, synthetic construct
  REGION 1..14: note = GFR-binding peptide
  VARIANT 1: note = Xaa is C or S
XAPTQLSPISVLYK

SEQ ID NO: 1329 - protein, 12 aa, synthetic construct
  REGION 1..12: note = GFR-binding peptide
PTELNAISMLYF

SEQ ID NO: 1330 - protein, 17 aa, synthetic construct
  REGION 1..17: note = GFR-binding peptide
  VARIANT 3..4: note = Xaa is C or S
SPXXVPQDLSATSILYY

SEQ ID NO: 1331 - protein, 12 aa, synthetic construct
  REGION 1..12: note = GFR-binding peptide
QVQLSATSVLYY

SEQ ID NO: 1332 - protein, 16 aa, synthetic construct
  REGION 1..16: note = GFR-binding peptide
  VARIANT 2..3: note = Xaa is C or S
AXXVPTELSPISMLYK

SEQ ID NO: 1333 - protein, 19 aa, synthetic construct
  REGION 1..19: note = GFR-binding peptide
  VARIANT 4: note = Xaa is C or S
NVQXRPTQVQLSAISVLYL

SEQ ID NO: 1334 - protein, 15 aa, synthetic construct
  REGION 1..15: note = GFR-binding peptide
RPTQVQLSATSVLYY

SEQ ID NO: 1335 - protein, 14 aa, synthetic construct
  REGION 1..14: note = GFR-binding peptide
PTQVQLSATSVLYY

SEQ ID NO: 1336 - protein, 9 aa, synthetic construct
  REGION 1..9: note = GFR-binding peptide
LSATSILYY

SEQ ID NO: 1337 - protein, 18 aa, synthetic construct
  REGION 1..18: note = GFR-binding peptide
  VARIANT 5: note = Xaa is C or S
TKPTXAPTKLSATSVLYY

SEQ ID NO: 1338 - protein, 17 aa, synthetic construct
  REGION 1..17: note = GFR-binding peptide
  VARIANT 3..4: note = Xaa is C or S
KAXXVPTELSATSMLYY

SEQ ID NO: 1339 - protein, 13 aa, synthetic construct
  REGION 1..13: note = GFR-binding peptide
VPTELSPISMLYK

SEQ ID NO: 1340 - protein, 16 aa, synthetic construct
  REGION 1..16: note = GFR-binding peptide
  VARIANT 1: note = Xaa is C or S
XRPTQVQLSPISVLYK

SEQ ID NO: 1341 - protein, 13 aa, synthetic construct
  REGION 1..13: note = GFR-binding peptide
VPTKLNAISVLYF

SEQ ID NO: 1342 - protein, 14 aa, synthetic construct
  REGION 1..14: note = GFR-binding peptide
  VARIANT 1: note = Xaa is C or S
XVSQDLSPISILYK

SEQ ID NO: 1343 - protein, 19 aa, synthetic construct
  REGION 1..19: note = GFR-binding peptide
  VARIANT 5..6: note = Xaa is C or S
VPKAXXAPTKLNAISVLYF

SEQ ID NO: 1344 - protein, 12 aa, synthetic construct
  REGION 1..12: note = GFR-binding peptide
PQDLNAISILYF

SEQ ID NO: 1345 - protein, 14 aa, synthetic construct
  REGION 1..14: note = GFR-binding peptide
  VARIANT 1: note = Xaa is C or S
XAPTKLSAISVLYL

SEQ ID NO: 1346 - protein, 16 aa, synthetic construct
  REGION 1..16: note = GFR-binding peptide
  VARIANT 1: note = Xaa is C or S
XRPTQVQLNAISVLYF

SEQ ID NO: 1347 - protein, 19 aa, synthetic construct
  REGION 1..19: note = GFR-binding peptide
  VARIANT 5..6: note = Xaa is C or S
VPKPXXAPTKLSAISVLYL

SEQ ID NO: 1348 - protein, 19 aa, synthetic construct
  REGION 1..19: note = GFR-binding peptide
  VARIANT 5..6: note = Xaa is C or S
IPKAXXVPTELNAISMLYF

SEQ ID NO: 1349 - protein, 17 aa, synthetic construct
  REGION 1..17: note = GFR-binding peptide
  VARIANT 3..4: note = Xaa is C or S
SPXXVPQDLSAISILYL

SEQ ID NO: 1350 - protein, 14 aa, synthetic construct
  REGION 1..14: note = GFR-binding peptide
  VARIANT 1: note = Xaa is C or S
XVPTKLSATSVLYY

SEQ ID NO: 1351 - protein, 20 aa, synthetic construct
  REGION 1..20: note = GFR-binding peptide
  VARIANT 6..7: note = Xaa is C or S
SIPKAXXVPTELSPISMLYK

SEQ ID NO: 1352 - protein, 19 aa, synthetic construct
  REGION 1..19: note = GFR-binding peptide
  VARIANT 5..6: note = Xaa is C or S
SASPXXVPQDLNAISILYF

SEQ ID NO: 1353 - protein, 20 aa, synthetic construct
  REGION 1..20: note = GFR-binding peptide
  VARIANT 6..7: note = Xaa is C or S
SIPKAXXVPTELNAISMLYF

SEQ ID NO: 1354 - protein, 19 aa, synthetic construct
  REGION 1..19: note = GFR-binding peptide
  VARIANT 5..6: note = Xaa is C or S
VGKAXXVPTKLSAISVLYL

SEQ ID NO: 1355 - protein, 19 aa, synthetic construct
  REGION 1..19: note = GFR-binding peptide
  VARIANT 5..6: note = Xaa is C or S
VPKAXXAPTKLSPISVLYK

SEQ ID NO: 1356 - protein, 16 aa, synthetic construct
  REGION 1..16: note = GFR-binding peptide
  VARIANT 2..3: note = Xaa is C or S
AXXVPTELNAISMLYF

SEQ ID NO: 1357 - protein, 17 aa, synthetic construct
  REGION 1..17: note = GFR-binding peptide
  VARIANT 3..4: note = Xaa is C or S
APXXVPQALSATSILYY

SEQ ID NO: 1358 - protein, 15 aa, synthetic construct
  REGION 1..15: note = GFR-binding peptide
  VARIANT 1..2: note = Xaa is C or S
XXVPQDLSAISILYL

SEQ ID NO: 1359 - protein, 10 aa, synthetic construct
  REGION 1..10: note = GFR-binding peptide
DLSAISILYL

SEQ ID NO: 1360 - protein, 19 aa, synthetic construct
  REGION 1..19: note = GFR-binding peptide
  VARIANT 5..6: note = Xaa is C or S
SASPXXVPQDLSPISILYK

SEQ ID NO: 1361 - protein, 17 aa, synthetic construct
  REGION 1..17: note = GFR-binding peptide
  VARIANT 3..4: note = Xaa is C or S
KAXXVPTKLSAISVLYL

SEQ ID NO: 1362 - protein, 9 aa, synthetic construct
  REGION 1..9: note = GFR-binding peptide
LNAISMLYF

SEQ ID NO: 1363 - protein, 20 aa, synthetic construct
  REGION 1..20: note = GFR-binding peptide
  VARIANT 6..7: note = Xaa is C or S
AVPKAXXAPTKLSAISVLYL

SEQ ID NO: 1364 - protein, 10 aa, synthetic construct
  REGION 1..10: note = GFR-binding peptide
DLSATSILYY

SEQ ID NO: 1365 - protein, 16 aa, synthetic construct
  REGION 1..16: note = GFR-binding peptide
  VARIANT 2..3: note = Xaa is C or S
AXXAPTKLNAISVLYF

SEQ ID NO: 1366 - protein, 16 aa, synthetic construct
  REGION 1..16: note = GFR-binding peptide
  VARIANT 3: note = Xaa is C or S
PTXAPTKLSATSVLYY

SEQ ID NO: 1367 - protein, 11 aa, synthetic construct
  REGION 1..11: note = GFR-binding peptide
TQLSATSVLYY

SEQ ID NO: 1368 - protein, 17 aa, synthetic construct
  REGION 1..17: note = GFR-binding peptide
  VARIANT 3..4: note = Xaa is C or S
APXXVPQALSAISILYL

SEQ ID NO: 1369 - protein, 15 aa, synthetic construct
  REGION 1..15: note = GFR-binding peptide
  VARIANT 1..2: note = Xaa is C or S
XXVPTKLSAISVLYL

SEQ ID NO: 1370 - protein, 16 aa, synthetic construct
  REGION 1..16: note = GFR-binding peptide
  VARIANT 3: note = Xaa is C or S
PTXAPTKLSAISVLYL

SEQ ID NO: 1371 - protein, 14 aa, synthetic construct
  REGION 1..14: note = GFR-binding peptide
  VARIANT 1: note = Xaa is C or S
XVSQDLSAISILYL

SEQ ID NO: 1372 - protein, 15 aa, synthetic construct
  REGION 1..15: note = GFR-binding peptide
  VARIANT 1..2: note = Xaa is C or S
XXVPTKLNAISVLYF

SEQ ID NO: 1373 - protein, 19 aa, synthetic construct
  REGION 1..19: note = GFR-binding peptide
  VARIANT 5..6: note = Xaa is C or S
VGKAXXVPTKLSATSVLYY

SEQ ID NO: 1374 - protein, 9 aa, synthetic construct
  REGION 1..9: note = GFR-binding peptide
LSAISVLYL

SEQ ID NO: 1375 - protein, 11 aa, synthetic construct
  REGION 1..11: note = GFR-binding peptide
VQLSPISVLYK

SEQ ID NO: 1376 - protein, 11 aa, synthetic construct
  REGION 1..11: note = GFR-binding peptide
QALSAISILYL

SEQ ID NO: 1377 - protein, 11 aa, synthetic construct
  REGION 1..11: note = GFR-binding peptide
TQLSPISVLYK

SEQ ID NO: 1378 - protein, 20 aa, synthetic construct
  REGION 1..20: note = GFR-binding peptide
  VARIANT 6..7: note = Xaa is C or S
ASASPXXVPQDLSATSILYY

SEQ ID NO: 1379 - protein, 16 aa, synthetic construct
  REGION 1..16: note = GFR-binding peptide
  VARIANT 2..3: note = Xaa is C or S
PXXVPQDLSAISILYL

SEQ ID NO: 1380 - protein, 17 aa, synthetic construct
  REGION 1..17: note = GFR-binding peptide
  VARIANT 3..4: note = Xaa is C or S
KPXXAPTKLSATSVLYY

SEQ ID NO: 1381 - protein, 15 aa, synthetic construct
  REGION 1..15: note = GFR-binding peptide
  VARIANT 1..2: note = Xaa is C or S
XXVPTKLSATSVLYY

SEQ ID NO: 1382 - protein, 20 aa, synthetic construct
  REGION 1..20: note = GFR-binding peptide
  VARIANT 6..7: note = Xaa is C or S
KVGKAXXVPTKLSAISVLYL

SEQ ID NO: 1383 - protein, 19 aa, synthetic construct
  REGION 1..19: note = GFR-binding peptide
  VARIANT 5..6: note = Xaa is C or S
VPKPXXAPTQLSPISVLYK

SEQ ID NO: 1384 - protein, 20 aa, synthetic construct
  REGION 1..20: note = GFR-binding peptide
  VARIANT 6..7: note = Xaa is C or S
ASASPXXVSQDLSAISILYL

SEQ ID NO: 1385 - protein, 18 aa, synthetic construct
  REGION 1..18: note = GFR-binding peptide
  VARIANT 4..5: note = Xaa is C or S
AAPXXVPQALNAISILYF

SEQ ID NO: 1386 - protein, 16 aa, synthetic construct
  REGION 1..16: note = GFR-binding peptide
  VARIANT 2..3: note = Xaa is C or S
AXXAPTKLSPISVLYK

SEQ ID NO: 1387 - protein, 16 aa, synthetic construct
  REGION 1..16: note = GFR-binding peptide
  VARIANT 3: note = Xaa is C or S
PTXAPTKLSPISVLYK

SEQ ID NO: 1388 - protein, 15 aa, synthetic construct
  REGION 1..15: note = GFR-binding peptide
  VARIANT 1..2: note = Xaa is C or S
XXVSQDLNAISILYF

SEQ ID NO: 1389 - protein, 19 aa, synthetic construct
  REGION 1..19: note = GFR-binding peptide
  VARIANT 5..6: note = Xaa is C or S
VPKPXXAPTKLSPISVLYK

SEQ ID NO: 1390 - protein, 13 aa, synthetic construct
  REGION 1..13: note = GFR-binding peptide
VPTKLSAISVLYL

SEQ ID NO: 1391 - protein, 16 aa, synthetic construct
  REGION 1..16: note = GFR-binding peptide
  VARIANT 2..3: note = Xaa is C or S
PXXAPTKLSAISVLYL

SEQ ID NO: 1392 - protein, 15 aa, synthetic construct
  REGION 1..15: note = GFR-binding peptide
  VARIANT 1..2: note = Xaa is C or S
XXVPQDLSATSILYY

SEQ ID NO: 1393 - protein, 13 aa, synthetic construct
  REGION 1..13: note = GFR-binding peptide
VPQDLSATSILYY

SEQ ID NO: 1394 - protein, 12 aa, synthetic construct
  REGION 1..12: note = GFR-binding peptide
QVQLSPISVLYK

SEQ ID NO: 1395 - protein, 11 aa, synthetic construct
  REGION 1..11: note = GFR-binding peptide
QALNAISILYF

SEQ ID NO: 1396 - protein, 20 aa, synthetic construct
  REGION 1..20: note = GFR-binding peptide
  VARIANT 6..7: note = Xaa is C or S
ASASPXXVSQDLNAISILYF

SEQ ID NO: 1397 - protein, 14 aa, synthetic construct
  REGION 1..14: note = GFR-binding peptide
PTQVQLSAISVLYL

SEQ ID NO: 1398 - protein, 10 aa, synthetic construct
  REGION 1..10: note = GFR-binding peptide
QLSPISVLYK

SEQ ID NO: 1399 - protein, 11 aa, synthetic construct
  REGION 1..11: note = GFR-binding peptide
TQLSAISVLYL

SEQ ID NO: 1400 - protein, 13 aa, synthetic construct
  REGION 1..13: note = GFR-binding peptide
VSQDLNAISILYF

SEQ ID NO: 1401 - protein, 14 aa, synthetic construct
  REGION 1..14: note = GFR-binding peptide
  VARIANT 1: note = Xaa is C or S
XAPTQLSAISVLYL

SEQ ID NO: 1402 - protein, 11 aa, synthetic construct
  REGION 1..11: note = GFR-binding peptide
QDLSAISILYL

SEQ ID NO: 1403 - protein, 16 aa, synthetic construct
  REGION 1..16: note = GFR-binding peptide
  VARIANT 2..3: note = Xaa is C or S
PXXVPQDLSPISILYK

SEQ ID NO: 1404 - protein, 15 aa, synthetic construct
  REGION 1..15: note = GFR-binding peptide
  VARIANT 1..2: note = Xaa is C or S
XXVSQDLSPISILYK

SEQ ID NO: 1405 - protein, 18 aa, synthetic construct
  REGION 1..18: note = GFR-binding peptide
  VARIANT 4..5: note = Xaa is C or S
ASPXXVPQDLNAISILYF

SEQ ID NO: 1406 - protein, 11 aa, synthetic construct
  REGION 1..11: note = GFR-binding peptide
QALSPISILYK

SEQ ID NO: 1407 - protein, 20 aa, synthetic construct
  REGION 1..20: note = GFR-binding peptide
  VARIANT 6..7: note = Xaa is C or S
ASASPXXVSQDLSPISILYK

SEQ ID NO: 1408 - protein, 15 aa, synthetic construct
  REGION 1..15: note = GFR-binding peptide
  VARIANT 1..2: note = Xaa is C or S
XXVPTELSATSMLYY

SEQ ID NO: 1409 - protein, 17 aa, synthetic construct
  REGION 1..17: note = GFR-binding peptide
  VARIANT 4: note = Xaa is C or S
KPTXAPTKLSPISVLYK

SEQ ID NO: 1410 - protein, 14 aa, synthetic construct
  REGION 1..14: note = GFR-binding peptide
  VARIANT 1: note = Xaa is C or S
XVSQDLSATSILYY

SEQ ID NO: 1411 - protein, 13 aa, synthetic construct
  REGION 1..13: note = GFR-binding peptide
VSQDLSPISILYK

SEQ ID NO: 1412 - protein, 16 aa, synthetic construct
  REGION 1..16: note = GFR-binding peptide
  VARIANT 2..3: note = Xaa is C or S
PXXVPQDLNAISILYF

SEQ ID NO: 1413 - protein, 13 aa, synthetic construct
  REGION 1..13: note = GFR-binding peptide
VPTELSATSMLYY

SEQ ID NO: 1414 - protein, 14 aa, synthetic construct
  REGION 1..14: note = GFR-binding peptide
  VARIANT 1: note = Xaa is C or S
XAPTQLSATSVLYY

SEQ ID NO: 1415 - protein, 9 aa, synthetic construct
  REGION 1..9: note = GFR-binding peptide
LSPISILYK

SEQ ID NO: 1416 - protein, 16 aa, synthetic construct
  REGION 1..16: note = GFR-binding peptide
  VARIANT 1: note = Xaa is C or S
XRPTQVQLSATSVLYY

SEQ ID NO: 1417 - protein, 15 aa, synthetic construct
  REGION 1..15: note = GFR-binding peptide
  VARIANT 1..2: note = Xaa is C or S
XXVPQALSPISILYK

SEQ ID NO: 1418 - protein, 16 aa, synthetic construct
  REGION 1..16: note = GFR-binding peptide
  VARIANT 2..3: note = Xaa is C or S
PXXAPTQLSPISVLYK

SEQ ID NO: 1419 - protein, 12 aa, synthetic construct
  REGION 1..12: note = GFR-binding peptide
QVQLNAISVLYF

SEQ ID NO: 1420 - protein, 16 aa, synthetic construct
  REGION 1..16: note = GFR-binding peptide
  VARIANT 2..3: note = Xaa is C or S
AXXVPTELSATSMLYY

SEQ ID NO: 1421 - protein, 19 aa, synthetic construct
  REGION 1..19: note = GFR-binding peptide
  VARIANT 5..6: note = Xaa is C or S
SASPXXVSQDLNAISILYF

SEQ ID NO: 1422 - protein, 17 aa, synthetic construct
  REGION 1..17: note = GFR-binding peptide
  VARIANT 4: note = Xaa is C or S
KPTXAPTKLSATSVLYY

SEQ ID NO: 1423 - protein, 18 aa, synthetic construct
  REGION 1..18: note = GFR-binding peptide
  VARIANT 4..5: note = Xaa is C or S
AAPXXVPQALSPISILYK

SEQ ID NO: 1424 - protein, 14 aa, synthetic construct
  REGION 1..14: note = GFR-binding peptide
PTQVQLSPISVLYK

SEQ ID NO: 1425 - protein, 13 aa, synthetic construct
  REGION 1..13: note = GFR-binding peptide
VPTKLSATSVLYY

SEQ ID NO: 1426 - protein, 20 aa, synthetic construct
  REGION 1..20: note = GFR-binding peptide
  VARIANT 6..7: note = Xaa is C or S
YVPKPXXAPTKLSAISVLYL

SEQ ID NO: 1427 - protein, 16 aa, synthetic construct
  REGION 1..16: note = GFR-binding peptide
  VARIANT 2..3: note = Xaa is C or S
PXXVPQALNAISILYF

SEQ ID NO: 1428 - protein, 10 aa, synthetic construct
  REGION 1..10: note = GFR-binding peptide
KLSAISVLYL

SEQ ID NO: 1429 - protein, 14 aa, synthetic construct
  REGION 1..14: note = GFR-binding peptide
  VARIANT 1: note = Xaa is C or S
XAPTKLSPISVLYK

SEQ ID NO: 1430 - protein, 15 aa, synthetic construct
  REGION 1..15: note = GFR-binding peptide
  VARIANT 1..2: note = Xaa is C or S
XXVSQDLSAISILYL

SEQ ID NO: 1431 - protein, 18 aa, synthetic construct
  REGION 1..18: note = GFR-binding peptide
  VARIANT 4..5: note = Xaa is C or S
PKPXXAPTQLSPISVLYK

SEQ ID NO: 1432 - protein, 13 aa, synthetic construct
  REGION 1..13: note = GFR-binding peptide
APTQLSPISVLYK

SEQ ID NO: 1433 - protein, 18 aa, synthetic construct
  REGION 1..18: note = GFR-binding peptide
  VARIANT 4..5: note = Xaa is C or S
ASPXXVSQDLSATSILYY

SEQ ID NO: 1434 - protein, 10 aa, synthetic construct
  REGION 1..10: note = GFR-binding peptide
ALSPISILYK

SEQ ID NO: 1435 - protein, 18 aa, synthetic construct
  REGION 1..18: note = GFR-binding peptide
  VARIANT 4..5: note = Xaa is C or S
PKAXXVPTELSATSMLYY

SEQ ID NO: 1436 - protein, 17 aa, synthetic construct
  REGION 1..17: note = GFR-binding peptide
  VARIANT 3..4: note = Xaa is C or S
KAXXAPTKLSPISVLYK

SEQ ID NO: 1437 - protein, 12 aa, synthetic construct
  REGION 1..12: note = GFR-binding peptide
PQALSATSILYY

SEQ ID NO: 1438 - protein, 14 aa, synthetic construct
  REGION 1..14: note = GFR-binding peptide
  VARIANT 1: note = Xaa is C or S
XVPQALSATSILYY

SEQ ID NO: 1439 - protein, 12 aa, synthetic construct
  REGION 1..12: note = GFR-binding peptide
PQDLSPISILYK

SEQ ID NO: 1440 - protein, 13 aa, synthetic construct
  REGION 1..13: note = GFR-binding peptide
VPQALSPISILYK

SEQ ID NO: 1441 - protein, 20 aa, synthetic construct
  REGION 1..20: note = GFR-binding peptide
  VARIANT 6..7: note = Xaa is C or S
ASAAPXXVPQALSATSILYY

SEQ ID NO: 1442 - protein, 13 aa, synthetic construct
  REGION 1..13: note = GFR-binding peptide
TQVQLSATSVLYY

SEQ ID NO: 1443 - protein, 15 aa, synthetic construct
  REGION 1..15: note = GFR-binding peptide
  VARIANT 1..2: note = Xaa is C or S
XXAPTQLSPISVLYK

SEQ ID NO: 1444 - protein, 11 aa, synthetic construct
  REGION 1..11: note = GFR-binding peptide
TELSATSMLYY

SEQ ID NO: 1445 - protein, 19 aa, synthetic construct
  REGION 1..19: note = GFR-binding peptide
  VARIANT 5..6: note = Xaa is C or S
SAAPXXVPQALSAISILYL

SEQ ID NO: 1446 - protein, 15 aa, synthetic construct
  REGION 1..15: note = GFR-binding peptide
  VARIANT 1..2: note = Xaa is C or S
XXVPTELNAISMLYF

SEQ ID NO: 1447 - protein, 18 aa, synthetic construct
  REGION 1..18: note = GFR-binding peptide
  VARIANT 4..5: note = Xaa is C or S
PKPXXAPTKLSATSVLYY

SEQ ID NO: 1448 - protein, 14 aa, synthetic construct
  REGION 1..14: note = GFR-binding peptide
  VARIANT 1: note = Xaa is C or S
XVPQDLSPISILYK

SEQ ID NO: 1449 - protein, 20 aa, synthetic construct
  REGION 1..20: note = GFR-binding peptide
  VARIANT 6..7: note = Xaa is C or S
ASASPXXVPQDLSAISILYL

SEQ ID NO: 1450 - protein, 19 aa, synthetic construct
  REGION 1..19: note = GFR-binding peptide
  VARIANT 6: note = Xaa is C or S
VTKPTXAPTKLSPISVLYK

SEQ ID NO: 1451 - protein, 15 aa, synthetic construct
  REGION 1..15: note = GFR-binding peptide
  VARIANT 2: note = Xaa is C or S
TXAPTKLSAISVLYL

SEQ ID NO: 1452 - protein, 18 aa, synthetic construct
  REGION 1..18: note = GFR-binding peptide
  VARIANT 4..5: note = Xaa is C or S
PKAXXAPTKLSPISVLYK

SEQ ID NO: 1453 - protein, 12 aa, synthetic construct
  REGION 1..12: note = GFR-binding peptide
PTKLSAISVLYL

SEQ ID NO: 1454 - protein, 15 aa, synthetic construct
  REGION 1..15: note = GFR-binding peptide
  VARIANT 1..2: note = Xaa is C or S
XXVPQDLSPISILYK

SEQ ID NO: 1455 - protein, 15 aa, synthetic construct
  REGION 1..15: note = GFR-binding peptide
RPTQVQLSPISVLYK

SEQ ID NO: 1456 - protein, 17 aa, synthetic construct
  REGION 1..17: note = GFR-binding peptide
  VARIANT 2: note = Xaa is C or S
QXRPTQVQLNAISVLYF

SEQ ID NO: 1457 - protein, 13 aa, synthetic construct
  REGION 1..13: note = GFR-binding peptide
VPTELNAISMLYF

SEQ ID NO: 1458 - protein, 19 aa, synthetic construct
  REGION 1..19: note = GFR-binding peptide
  VARIANT 5..6: note = Xaa is C or S
VPKPXXAPTKLSATSVLYY

SEQ ID NO: 1459 - protein, 20 aa, synthetic construct
  REGION 1..20: note = GFR-binding peptide
  VARIANT 6..7: note = Xaa is C or S
ASAAPXXVPQALSPISILYK

SEQ ID NO: 1460 - protein, 18 aa, synthetic construct
  REGION 1..18: note = GFR-binding peptide
  VARIANT 4..5: note = Xaa is C or S
PKPXXAPTQLSATSVLYY

SEQ ID NO: 1461 - protein, 20 aa, synthetic construct
  REGION 1..20: note = GFR-binding peptide
  VARIANT 6..7: note = Xaa is C or S
KIPKAXXVPTELSPISMLYK

SEQ ID NO: 1462 - protein, 17 aa, synthetic construct
  REGION 1..17: note = GFR-binding peptide
  VARIANT 3..4: note = Xaa is C or S
KPXXAPTQLSATSVLYY

SEQ ID NO: 1463 - protein, 20 aa, synthetic construct
  REGION 1..20: note = GFR-binding peptide
  VARIANT 6..7: note = Xaa is C or S
ASASPXXVSQDLSATSILYY

SEQ ID NO: 1464 - protein, 16 aa, synthetic construct
  REGION 1..16: note = GFR-binding peptide
  VARIANT 2..3: note = Xaa is C or S
AXXVPTKLSATSVLYY

SEQ ID NO: 1465 - protein, 12 aa, synthetic construct
  REGION 1..12: note = GFR-binding peptide
SQDLSPISILYK

SEQ ID NO: 1466 - protein, 20 aa, synthetic construct
  REGION 1..20: note = GFR-binding peptide
  VARIANT 6..7: note = Xaa is C or S
KIPKAXXVPTELSATSMLYY

SEQ ID NO: 1467 - protein, 17 aa, synthetic construct
  REGION 1..17: note = GFR-binding peptide
  VARIANT 3..4: note = Xaa is C or S
KPXXAPTKLSPISVLYK

SEQ ID NO: 1468 - protein, 17 aa, synthetic construct
  REGION 1..17: note = GFR-binding peptide
  VARIANT 3..4: note = Xaa is C or S
KPXXAPTQLSPISVLYK

SEQ ID NO: 1469 - protein, 12 aa, synthetic construct
  REGION 1..12: note = GFR-binding peptide
PQDLSATSILYY

SEQ ID NO: 1470 - protein, 16 aa, synthetic construct
  REGION 1..16: note = GFR-binding peptide
  VARIANT 2..3: note = Xaa is C or S
PXXVSQDLNAISILYF

SEQ ID NO: 1471 - protein, 14 aa, synthetic construct
  REGION 1..14: note = GFR-binding peptide
  VARIANT 1: note = Xaa is C or S
XVPQDLSATSILYY

SEQ ID NO: 1472 - protein, 14 aa, synthetic construct
  REGION 1..14: note = GFR-binding peptide
  VARIANT 1: note = Xaa is C or S
XVPQALSPISILYK

SEQ ID NO: 1473 - protein, 18 aa, synthetic construct
  REGION 1..18: note = GFR-binding peptide
  VARIANT 3: note = Xaa is C or S
VQXRPTQVQLSPISVLYK

SEQ ID NO: 1474 - protein, 14 aa, synthetic construct
  REGION 1..14: note = GFR-binding peptide
  VARIANT 1: note = Xaa is C or S
XVPTELNAISMLYF

SEQ ID NO: 1475 - protein, 13 aa, synthetic construct
  REGION 1..13: note = GFR-binding peptide
TQVQLSPISVLYK

SEQ ID NO: 1476 - protein, 17 aa, synthetic construct
  REGION 1..17: note = GFR-binding peptide
  VARIANT 3..4: note = Xaa is C or S
SPXXVSQDLSAISILYL

SEQ ID NO: 1477 - protein, 20 aa, synthetic construct
  REGION 1..20: note = GFR-binding peptide
  VARIANT 6..7: note = Xaa is C or S
ASASPXXVPQDLNAISILYF

SEQ ID NO: 1478 - protein, 18 aa, synthetic construct
  REGION 1..18: note = GFR-binding peptide
  VARIANT 5: note = Xaa is C or S
TKPTXAPTKLSPISVLYK

SEQ ID NO: 1479 - protein, 12 aa, synthetic construct
  REGION 1..12: note = GFR-binding peptide
PTQLSAISVLYL

SEQ ID NO: 1480 - protein, 18 aa, synthetic construct
  REGION 1..18: note = GFR-binding peptide
  VARIANT 4..5: note = Xaa is C or S
PKPXXAPTKLSPISVLYK

SEQ ID NO: 1481 - protein, 14 aa, synthetic construct
  REGION 1..14: note = GFR-binding peptide
  VARIANT 1: note = Xaa is C or S
XVPTKLNAISVLYF

SEQ ID NO: 1482 - protein, 10 aa, synthetic construct
  REGION 1..10: note = GFR-binding peptide
DLSPISILYK

SEQ ID NO: 1483 - protein, 15 aa, synthetic construct
  REGION 1..15: note = GFR-binding peptide
  VARIANT 1..2: note = Xaa is C or S
XXAPTQLSATSVLYY

SEQ ID NO: 1484 - protein, 14 aa, synthetic construct
  REGION 1..14: note = GFR-binding peptide
  VARIANT 1: note = Xaa is C or S
XVPTKLSAISVLYL

SEQ ID NO: 1485 - protein, 13 aa, synthetic construct
  REGION 1..13: note = GFR-binding peptide
APTKLSPISVLYK

SEQ ID NO: 1486 - protein, 19 aa, synthetic construct
  REGION 1..19: note = GFR-binding peptide
  VARIANT 6: note = Xaa is C or S
VTKPTXAPTKLSATSVLYY

SEQ ID NO: 1487 - protein, 16 aa, synthetic construct
  REGION 1..16: note = GFR-binding peptide
  VARIANT 2..3: note = Xaa is C or S
PXXVSQDLSAISILYL

SEQ ID NO: 1488 - protein, 13 aa, synthetic construct
  REGION 1..13: note = GFR-binding peptide
APTQLSATSVLYY

SEQ ID NO: 1489 - protein, 19 aa, synthetic construct
  REGION 1..19: note = GFR-binding peptide
  VARIANT 4: note = Xaa is C or S
NVQXRPTQVQLSPISVLYK

SEQ ID NO: 1490 - protein, 17 aa, synthetic construct
  REGION 1..17: note = GFR-binding peptide
  VARIANT 3..4: note = Xaa is C or S
SPXXVSQDLNAISILYF

SEQ ID NO: 1491 - protein, 11 aa, synthetic construct
  REGION 1..11: note = GFR-binding peptide
VQLSATSVLYY

SEQ ID NO: 1492 - protein, 13 aa, synthetic construct
  REGION 1..13: note = GFR-binding peptide
LYLVSIASLQTPA

SEQ ID NO: 1493 - protein, 18 aa, synthetic construct
  REGION 1..18: note = GFR-binding peptide
  VARIANT 14..15: note = Xaa is C or S
KYLMSIPSLETPVXXAKP

SEQ ID NO: 1494 - protein, 10 aa, synthetic construct
  REGION 1..10: note = GFR-binding peptide
YYLISTASLA

SEQ ID NO: 1495 - protein, 10 aa, synthetic construct
  REGION 1..10: note = GFR-binding peptide
KYLMSIPSLE

SEQ ID NO: 1496 - protein, 18 aa, synthetic construct
  REGION 1..18: note = GFR-binding peptide
  VARIANT 14..15: note = Xaa is C or S
KYLISIPSLDQSVXXPSA

SEQ ID NO: 1497 - protein, 19 aa, synthetic construct
  REGION 1..19: note = GFR-binding peptide
  VARIANT 14..15: note = Xaa is C or S
YYLISTASLDQSVXXPSAS

SEQ ID NO: 1498 - protein, 19 aa, synthetic construct
  REGION 1..19: note = GFR-binding peptide
  VARIANT 14..15: note = Xaa is C or S
LYLISIASLDQSVXXPSAS

SEQ ID NO: 1499 - protein, 11 aa, synthetic construct
  REGION 1..11: note = GFR-binding peptide
FYLISIANLDQ

SEQ ID NO: 1500 - protein, 13 aa, synthetic construct
  REGION 1..13: note = GFR-binding peptide
LYLISIASLAQPV

SEQ ID NO: 1501 - protein, 10 aa, synthetic construct
  REGION 1..10: note = GFR-binding peptide
LYLISIASLA

SEQ ID NO: 1502 - protein, 16 aa, synthetic construct
  REGION 1..16: note = GFR-binding peptide
  VARIANT 14..15: note = Xaa is C or S
YYLVSTASLQTPAXXP

SEQ ID NO: 1503 - protein, 16 aa, synthetic construct
  REGION 1..16: note = GFR-binding peptide
  VARIANT 14..15: note = Xaa is C or S
YYLISTASLAQPVXXP

SEQ ID NO: 1504 - protein, 12 aa, synthetic construct
  REGION 1..12: note = GFR-binding peptide
KYLISIPSLAQP

SEQ ID NO: 1505 - protein, 13 aa, synthetic construct
  REGION 1..13: note = GFR-binding peptide
YYLISTASLDQSV

SEQ ID NO: 1506 - protein, 10 aa, synthetic construct
  REGION 1..10: note = GFR-binding peptide
FYLMSIANLE

SEQ ID NO: 1507 - protein, 18 aa, synthetic construct
  REGION 1..18: note = GFR-binding peptide
  VARIANT 14..15: note = Xaa is C or S
YYLISTASLDQPVXXPSA

SEQ ID NO: 1508 - protein, 18 aa, synthetic construct
  REGION 1..18: note = GFR-binding peptide
  VARIANT 14..15: note = Xaa is C or S
YYLISTASLAQPVXXPAA

SEQ ID NO: 1509 - protein, 12 aa, synthetic construct
  REGION 1..12: note = GFR-binding peptide
LYLISIASLDQS

SEQ ID NO: 1510 - protein, 18 aa, synthetic construct
  REGION 1..18: note = GFR-binding peptide
  VARIANT 14..15: note = Xaa is C or S
FYLVSIANLKTPAXXAKP

SEQ ID NO: 1511 - protein, 17 aa, synthetic construct
  REGION 1..17: note = GFR-binding peptide
  VARIANT 16: note = Xaa is C or S
KYLVSIPSLQVQTPRXQ

SEQ ID NO: 1512 - protein, 18 aa, synthetic construct
  REGION 1..18: note = GFR-binding peptide
  VARIANT 16: note = Xaa is C or S
LYLVSIASLQVQTPRXQV

SEQ ID NO: 1513 - protein, 12 aa, synthetic construct
  REGION 1..12: note = GFR-binding peptide
YYLVSTASLKTP

SEQ ID NO: 1514 - protein, 10 aa, synthetic construct
  REGION 1..10: note = GFR-binding peptide
KYLVSIPSLK

SEQ ID NO: 1515 - protein, 10 aa, synthetic construct
  REGION 1..10: note = GFR-binding peptide
FYLVSIANLK

SEQ ID NO: 1516 - protein, 16 aa, synthetic construct
  REGION 1..16: note = GFR-binding peptide
  VARIANT 14..15: note = Xaa is C or S
LYLISIASLAQPVXXP

SEQ ID NO: 1517 - protein, 12 aa, synthetic construct
  REGION 1..12: note = GFR-binding peptide
KYLVSIPSLQTP

SEQ ID NO: 1518 - protein, 16 aa, synthetic construct
  REGION 1..16: note = GFR-binding peptide
  VARIANT 14..15: note = Xaa is C or S
LYLVSIASLQTPAXXP

SEQ ID NO: 1519 - protein, 18 aa, synthetic construct
  REGION 1..18: note = GFR-binding peptide
  VARIANT 14..15: note = Xaa is C or S
FYLVSIANLQTPAXXPKP

SEQ ID NO: 1520 - protein, 17 aa, synthetic construct
  REGION 1..17: note = GFR-binding peptide
  VARIANT 16: note = Xaa is C or S
LYLVSIASLQVQTPRXQ

SEQ ID NO: 1521 - protein, 19 aa, synthetic construct
  REGION 1..19: note = GFR-binding peptide
  VARIANT 14..15: note = Xaa is C or S
YYLVSTASLQTPAXXPKPV

SEQ ID NO: 1522 - protein, 13 aa, synthetic construct
  REGION 1..13: note = GFR-binding peptide
LYLISIASLDQSV

SEQ ID NO: 1523 - protein, 14 aa, synthetic construct
  REGION 1..14: note = GFR-binding peptide
FYLVSIANLQVQTP

SEQ ID NO: 1524 - protein, 11 aa, synthetic construct
  REGION 1..11: note = GFR-binding peptide
FYLVSIANLKT

SEQ ID NO: 1525 - protein, 17 aa, synthetic construct
  REGION 1..17: note = GFR-binding peptide
  VARIANT 14..15: note = Xaa is C or S
FYLISIANLDQPVXXPS

SEQ ID NO: 1526 - protein, 16 aa, synthetic construct
  REGION 1..16: note = GFR-binding peptide
  VARIANT 14..15: note = Xaa is C or S
LYLVSIASLKTPAXXA

SEQ ID NO: 1527 - protein, 18 aa, synthetic construct
  REGION 1..18: note = GFR-binding peptide
  VARIANT 14..15: note = Xaa is C or S
LYLISIASLDQPVXXPSA

SEQ ID NO: 1528 - protein, 15 aa, synthetic construct
  REGION 1..15: note = GFR-binding peptide
  VARIANT 14..15: note = Xaa is C or S
LYLISIASLAQPVXX

SEQ ID NO: 1529 - protein, 18 aa, synthetic construct
  REGION 1..18: note = GFR-binding peptide
  VARIANT 14..15: note = Xaa is C or S
LYLVSIASLKTPVXXAKG

SEQ ID NO: 1530 - protein, 11 aa, synthetic construct
  REGION 1..11: note = GFR-binding peptide
KYLISIPSLDQ

SEQ ID NO: 1531 - protein, 18 aa, synthetic construct
  REGION 1..18: note = GFR-binding peptide
  VARIANT 16: note = Xaa is C or S
YYLVSTASLQVQTPRXQV

SEQ ID NO: 1532 - protein, 9 aa, synthetic construct
  REGION 1..9: note = GFR-binding peptide
YYLMSTASL

SEQ ID NO: 1533 - protein, 18 aa, synthetic construct
  REGION 1..18: note = GFR-binding peptide
  VARIANT 14..15: note = Xaa is C or S
FYLMSIANLETPVXXAKP

SEQ ID NO: 1534 - protein, 13 aa, synthetic construct
  REGION 1..13: note = GFR-binding peptide
YYLISTASLAQPV

SEQ ID NO: 1535 - protein, 15 aa, synthetic construct
  REGION 1..15: note = GFR-binding peptide
  VARIANT 14: note = Xaa is C or S
YYLVSTASLKTPAXT

SEQ ID NO: 1536 - protein, 11 aa, synthetic construct
  REGION 1..11: note = GFR-binding peptide
KYLMSIPSLET

SEQ ID NO: 1537 - protein, 11 aa, synthetic construct
  REGION 1..11: note = GFR-binding peptide
KYLVSIPSLKT

SEQ ID NO: 1538 - protein, 17 aa, synthetic construct
  REGION 1..17: note = GFR-binding peptide
  VARIANT 16: note = Xaa is C or S
YYLVSTASLQVQTPRXQ

SEQ ID NO: 1539 - protein, 17 aa, synthetic construct
  REGION 1..17: note = GFR-binding peptide
  VARIANT 14..15: note = Xaa is C or S
KYLISIPSLAQPVXXPA

SEQ ID NO: 1540 - protein, 18 aa, synthetic construct
  REGION 1..18: note = GFR-binding peptide
  VARIANT 14..15: note = Xaa is C or S
FYLVSIANLKTPVXXAKG

SEQ ID NO: 1541 - protein, 20 aa, synthetic construct
  REGION 1..20: note = GFR-binding peptide
  VARIANT 14..15: note = Xaa is C or S
YYLMSTASLETPVXXAKPIS

SEQ ID NO: 1542 - protein, 15 aa, synthetic construct
  REGION 1..15: note = GFR-binding peptide
  VARIANT 14..15: note = Xaa is C or S
YYLISTASLAQPVXX

SEQ ID NO: 1543 - protein, 17 aa, synthetic construct
  REGION 1..17: note = GFR-binding peptide
  VARIANT 14..15: note = Xaa is C or S
FYLMSIANLETPVXXAK

SEQ ID NO: 1544 - protein, 17 aa, synthetic construct
  REGION 1..17: note = GFR-binding peptide
  VARIANT 14..15: note = Xaa is C or S
FYLISIANLAQPVXXPA

SEQ ID NO: 1545 - protein, 18 aa, synthetic construct
  REGION 1..18: note = GFR-binding peptide
  VARIANT 14..15: note = Xaa is C or S
KYLVSIPSLKTPVXXAKG

SEQ ID NO: 1546 - protein, 20 aa, synthetic construct
  REGION 1..20: note = GFR-binding peptide
  VARIANT 14..15: note = Xaa is C or S
LYLVSIASLQTPAXXPKPVT

SEQ ID NO: 1547 - protein, 18 aa, synthetic construct
  REGION 1..18: note = GFR-binding peptide
  VARIANT 14..15: note = Xaa is C or S
LYLMSIASLETPVXXAKP

SEQ ID NO: 1548 - protein, 18 aa, synthetic construct
  REGION 1..18: note = GFR-binding peptide
  VARIANT 14..15: note = Xaa is C or S
LYLISIASLAQPVXXPAA

SEQ ID NO: 1549 - protein, 19 aa, synthetic construct
  REGION 1..19: note = GFR-binding peptide
  VARIANT 14..15: note = Xaa is C or S
LYLVSIASLQTPAXXPKPV

SEQ ID NO: 1550 - protein, 11 aa, synthetic construct
  REGION 1..11: note = GFR-binding peptide
FYLMSIANLET

SEQ ID NO: 1551 - protein, 17 aa, synthetic construct
  REGION 1..17: note = GFR-binding peptide
  VARIANT 14..15: note = Xaa is C or S
KYLMSIPSLETPVXXAK

SEQ ID NO: 1552 - protein, 12 aa, synthetic construct
  REGION 1..12: note = GFR-binding peptide
YYLISTASLDQS

SEQ ID NO: 1553 - protein, 14 aa, synthetic construct
  REGION 1..14: note = GFR-binding peptide
  VARIANT 14: note = Xaa is C or S
LYLISIASLAQPVX

SEQ ID NO: 1554 - protein, 11 aa, synthetic construct
  REGION 1..11: note = GFR-binding peptide
LYLMSIASLET

SEQ ID NO: 1555 - protein, 20 aa, synthetic construct
  REGION 1..20: note = GFR-binding peptide
  VARIANT 14: note = Xaa is C or S
LYLVSIASLKTPAXTPKTVH

SEQ ID NO: 1556 - protein, 18 aa, synthetic construct
  REGION 1..18: note = GFR-binding peptide
  VARIANT 14..15: note = Xaa is C or S
KYLISIPSLDQPVXXPSA

SEQ ID NO: 1557 - protein, 13 aa, synthetic construct
  REGION 1..13: note = GFR-binding peptide
LYLVSIASLKTPA

SEQ ID NO: 1558 - protein, 14 aa, synthetic construct
  REGION 1..14: note = GFR-binding peptide
  VARIANT 14: note = Xaa is C or S
KYLVSIPSLKTPVX

SEQ ID NO: 1559 - protein, 19 aa, synthetic construct
  REGION 1..19: note = GFR-binding peptide
  VARIANT 14..15: note = Xaa is C or S
YYLISTASLAQPVXXPAAS

SEQ ID NO: 1560 - protein, 17 aa, synthetic construct
  REGION 1..17: note = GFR-binding peptide
  VARIANT 14..15: note = Xaa is C or S
FYLVSIANLKTPAXXAK

SEQ ID NO: 1561 - protein, 17 aa, synthetic construct
  REGION 1..17: note = GFR-binding peptide
  VARIANT 14..15: note = Xaa is C or S
KYLISIPSLDQPVXXPS

SEQ ID NO: 1562 - protein, 19 aa, synthetic construct
  REGION 1..19: note = GFR-binding peptide
  VARIANT 14..15: note = Xaa is C or S
YYLISTASLDQPVXXPSAS

SEQ ID NO: 1563 - protein, 16 aa, synthetic construct
  REGION 1..16: note = GFR-binding peptide
  VARIANT 16: note = Xaa is C or S
LYLVSIASLQVQTPRX

SEQ ID NO: 1564 - protein, 19 aa, synthetic construct
  REGION 1..19: note = GFR-binding peptide
  VARIANT 14..15: note = Xaa is C or S
LYLVSIASLKTPAXXAKPV

SEQ ID NO: 1565 - protein, 16 aa, synthetic construct
  REGION 1..16: note = GFR-binding peptide
  VARIANT 14..15: note = Xaa is C or S
KYLISIPSLAQPVXXP

SEQ ID NO: 1566 - protein, 14 aa, synthetic construct
  REGION 1..14: note = GFR-binding peptide
  VARIANT 14: note = Xaa is C or S
FYLVSIANLKTPAX

SEQ ID NO: 1567 - protein, 16 aa, synthetic construct
  REGION 1..16: note = GFR-binding peptide
  VARIANT 14..15: note = Xaa is C or S
YYLVSTASLKTPAXXP

SEQ ID NO: 1568 - protein, 19 aa, synthetic construct
  REGION 1..19: note = GFR-binding peptide
  VARIANT 14..15: note = Xaa is C or S
LYLISIASLDQPVXXPSAS

SEQ ID NO: 1569 - protein, 17 aa, synthetic construct
  REGION 1..17: note = GFR-binding peptide
  VARIANT 14..15: note = Xaa is C or S
FYLVSIANLKTPVXXAK

SEQ ID NO: 1570 - protein, 15 aa, synthetic construct
  REGION 1..15: note = GFR-binding peptide
FYLVSIANLQVQTPR

SEQ ID NO: 1571 - protein, 16 aa, synthetic construct
  REGION 1..16: note = GFR-binding peptide
  VARIANT 14..15: note = Xaa is C or S
LYLMSIASLETPVXXA

SEQ ID NO: 1572 - protein, 19 aa, synthetic construct
  REGION 1..19: note = GFR-binding peptide
  VARIANT 14..15: note = Xaa is C or S
KYLISIPSLDQSVXXPSAS

SEQ ID NO: 1573 - protein, 19 aa, synthetic construct
  REGION 1..19: note = GFR-binding peptide
  VARIANT 14: note = Xaa is C or S
FYLVSIANLKTPAXTPKTV

SEQ ID NO: 1574 - protein, 17 aa, synthetic construct
  REGION 1..17: note = GFR-binding peptide
  VARIANT 14: note = Xaa is C or S
LYLVSIASLKTPAXTPK

SEQ ID NO: 1575 - protein, 15 aa, synthetic construct
  REGION 1..15: note = GFR-binding peptide
  VARIANT 14..15: note = Xaa is C or S
FYLISIANLDQPVXX

SEQ ID NO: 1576 - protein, 14 aa, synthetic construct
  REGION 1..14: note = GFR-binding peptide
  VARIANT 14: note = Xaa is C or S
KYLMSIPSLETPVX

SEQ ID NO: 1577 - protein, 17 aa, synthetic construct
  REGION 1..17: note = GFR-binding peptide
  VARIANT 14..15: note = Xaa is C or S
YYLISTASLDQSVXXPS

SEQ ID NO: 1578 - protein, 8 aa, synthetic construct
  REGION 1..8: note = GFR-binding peptide
LYLMSIAS

SEQ ID NO: 1579 - protein, 11 aa, synthetic construct
  REGION 1..11: note = GFR-binding peptide
LYLVSIASLKT

SEQ ID NO: 1580 - protein, 11 aa, synthetic construct
  REGION 1..11: note = GFR-binding peptide
YYLISTASLAQ

SEQ ID NO: 1581 - protein, 11 aa, synthetic construct
  REGION 1..11: note = GFR-binding peptide
YYLISTASLDQ

SEQ ID NO: 1582 - protein, 12 aa, synthetic construct
  REGION 1..12: note = GFR-binding peptide
YYLMSTASLETP

SEQ ID NO: 1583 - protein, 20 aa, synthetic construct
  REGION 1..20: note = GFR-binding peptide
  VARIANT 14..15: note = Xaa is C or S
FYLMSIANLETPVXXAKPIK

SEQ ID NO: 1584 - protein, 18 aa, synthetic construct
  REGION 1..18: note = GFR-binding peptide
  VARIANT 16: note = Xaa is C or S
FYLVSIANLQVQTPRXQV

SEQ ID NO: 1585 - protein, 15 aa, synthetic construct
  REGION 1..15: note = GFR-binding peptide
  VARIANT 14..15: note = Xaa is C or S
FYLVSIANLQTPAXX

SEQ ID NO: 1586 - protein, 17 aa, synthetic construct
  REGION 1..17: note = GFR-binding peptide
  VARIANT 14..15: note = Xaa is C or S
LYLVSIASLKTPAXXPK

SEQ ID NO: 1587 - protein, 18 aa, synthetic construct
  REGION 1..18: note = GFR-binding peptide
  VARIANT 14..15: note = Xaa is C or S
LYLVSIASLKTPAXXAKP

SEQ ID NO: 1588 - protein, 12 aa, synthetic construct
  REGION 1..12: note = GFR-binding peptide
FYLISIANLDQS

SEQ ID NO: 1589 - protein, 11 aa, synthetic construct
  REGION 1..11: note = GFR-binding peptide
FYLVSIANLQV

SEQ ID NO: 1590 - protein, 10 aa, synthetic construct
  REGION 1..10: note = GFR-binding peptide
FYLISIANLA

SEQ ID NO: 1591 - protein, 20 aa, synthetic construct
  REGION 1..20: note = GFR-binding peptide
  VARIANT 14..15: note = Xaa is C or S
KYLVSIPSLKTPVXXAKGVK

SEQ ID NO: 1592 - protein, 15 aa, synthetic construct
  REGION 1..15: note = GFR-binding peptide
  VARIANT 14..15: note = Xaa is C or S
FYLISIANLAQPVXX

SEQ ID NO: 1593 - protein, 13 aa, synthetic construct
  REGION 1..13: note = GFR-binding peptide
FYLVSIANLQTPA

SEQ ID NO: 1594 - protein, 13 aa, synthetic construct
  REGION 1..13: note = GFR-binding peptide
LYLISIASLDQPV

SEQ ID NO: 1595 - protein, 13 aa, synthetic construct
  REGION 1..13: note = GFR-binding peptide
FYLISIANLAQPV

SEQ ID NO: 1596 - protein, 12 aa, synthetic construct
  REGION 1..12: note = GFR-binding peptide
KYLMSIPSLETP

SEQ ID NO: 1597 - protein, 14 aa, synthetic construct
  REGION 1..14: note = GFR-binding peptide
  VARIANT 14: note = Xaa is C or S
YYLMSTASLETPVX

SEQ ID NO: 1598 - protein, 14 aa, synthetic construct
  REGION 1..14: note = GFR-binding peptide
  VARIANT 14: note = Xaa is C or S
LYLISIASLDQPVX

SEQ ID NO: 1599 - protein, 9 aa, synthetic construct
  REGION 1..9: note = GFR-binding peptide
KYLMSIPSL

SEQ ID NO: 1600 - protein, 15 aa, synthetic construct
  REGION 1..15: note = GFR-binding peptide
  VARIANT 14: note = Xaa is C or S
KYLVSIPSLKTPAXT

SEQ ID NO: 1601 - protein, 18 aa, synthetic construct
  REGION 1..18: note = GFR-binding peptide
  VARIANT 14..15: note = Xaa is C or S
LYLVSIASLKTPAXXPKP

SEQ ID NO: 1602 - protein, 14 aa, synthetic construct
  REGION 1..14: note = GFR-binding peptide
  VARIANT 14: note = Xaa is C or S
FYLISIANLDQSVX

SEQ ID NO: 1603 - protein, 16 aa, synthetic construct
  REGION 1..16: note = GFR-binding peptide
  VARIANT 14..15: note = Xaa is C or S
YYLISTASLDQPVXXP

SEQ ID NO: 1604 - protein, 18 aa, synthetic construct
  REGION 1..18: note = GFR-binding peptide
  VARIANT 14..15: note = Xaa is C or S
YYLVSTASLKTPVXXAKG

SEQ ID NO: 1605 - protein, 15 aa, synthetic construct
  REGION 1..15: note = GFR-binding peptide
  VARIANT 14..15: note = Xaa is C or S
KYLMSIPSLETPVXX

SEQ ID NO: 1606 - protein, 14 aa, synthetic construct
  REGION 1..14: note = GFR-binding peptide
  VARIANT 14: note = Xaa is C or S
FYLISIANLDQPVX

SEQ ID NO: 1607 - protein, 16 aa, synthetic construct
  REGION 1..16: note = GFR-binding peptide
  VARIANT 14..15: note = Xaa is C or S
YYLISTASLDQSVXXP

SEQ ID NO: 1608 - protein, 16 aa, synthetic construct
  REGION 1..16: note = GFR-binding peptide
  VARIANT 14..15: note = Xaa is C or S
YYLVSTASLKTPAXXA

SEQ ID NO: 1609 - protein, 13 aa, synthetic construct
  REGION 1..13: note = GFR-binding peptide
FYLISIANLDQPV

SEQ ID NO: 1610 - protein, 20 aa, synthetic construct
  REGION 1..20: note = GFR-binding peptide
  VARIANT 14..15: note = Xaa is C or S
KYLISIPSLDQPVXXPSASA

SEQ ID NO: 1611 - protein, 17 aa, synthetic construct
  REGION 1..17: note = GFR-binding peptide
  VARIANT 14..15: note = Xaa is C or S
FYLVSIANLQTPAXXPK

SEQ ID NO: 1612 - protein, 15 aa, synthetic construct
  REGION 1..15: note = GFR-binding peptide
  VARIANT 14..15: note = Xaa is C or S
YYLISTASLDQSVXX

SEQ ID NO: 1613 - protein, 19 aa, synthetic construct
  REGION 1..19: note = GFR-binding peptide
  VARIANT 14..15: note = Xaa is C or S
FYLVSIANLKTPVXXAKGV

SEQ ID NO: 1614 - protein, 15 aa, synthetic construct
  REGION 1..15: note = GFR-binding peptide
  VARIANT 14..15: note = Xaa is C or S
LYLVSIASLKTPAXX

SEQ ID NO: 1615 - protein, 16 aa, synthetic construct
  REGION 1..16: note = GFR-binding peptide
  VARIANT 14..15: note = Xaa is C or S
FYLVSIANLKTPVXXA

SEQ ID NO: 1616 - protein, 9 aa, synthetic construct
  REGION 1..9: note = GFR-binding peptide
LYLISIASL

SEQ ID NO: 1617 - protein, 17 aa, synthetic construct
  REGION 1..17: note = GFR-binding peptide
  VARIANT 14..15: note = Xaa is C or S
FYLVSIANLKTPAXXPK

SEQ ID NO: 1618 - protein, 16 aa, synthetic construct
  REGION 1..16: note = GFR-binding peptide
  VARIANT 14..15: note = Xaa is C or S
KYLISIPSLDQSVXXP

SEQ ID NO: 1619 - protein, 10 aa, synthetic construct
  REGION 1..10: note = GFR-binding peptide
FYLISIANLD

SEQ ID NO: 1620 - protein, 8 aa, synthetic construct
  REGION 1..8: note = GFR-binding peptide
FYLVSIAN

SEQ ID NO: 1621 - protein, 18 aa, synthetic construct
  REGION 1..18: note = GFR-binding peptide
  VARIANT 14..15: note = Xaa is C or S
LYLVSIASLQTPAXXPKP

SEQ ID NO: 1622 - protein, 16 aa, synthetic construct
  REGION 1..16: note = GFR-binding peptide
  VARIANT 14..15: note = Xaa is C or S
FYLVSIANLQTPAXXP

SEQ ID NO: 1623 - protein, 15 aa, synthetic construct
  REGION 1..15: note = GFR-binding peptide
  VARIANT 14..15: note = Xaa is C or S
LYLVSIASLQTPAXX

SEQ ID NO: 1624 - protein, 20 aa, synthetic construct
  REGION 1..20: note = GFR-binding peptide
  VARIANT 14..15: note = Xaa is C or S
LYLMSIASLETPVXXAKPIK

SEQ ID NO: 1625 - protein, 20 aa, synthetic construct
  REGION 1..20: note = GFR-binding peptide
  VARIANT 14..15: note = Xaa is C or S
FYLISIANLAQPVXXPAASA

SEQ ID NO: 1626 - protein, 13 aa, synthetic construct
  REGION 1..13: note = GFR-binding peptide
LYLVSIASLQVQT

SEQ ID NO: 1627 - protein, 19 aa, synthetic construct
  REGION 1..19: note = GFR-binding peptide
  VARIANT 14: note = Xaa is C or S
LYLVSIASLKTPAXTPKTV

SEQ ID NO: 1628 - protein, 20 aa, synthetic construct
  REGION 1..20: note = GFR-binding peptide
  VARIANT 14..15: note = Xaa is C or S
LYLISIASLAQPVXXPAASA

SEQ ID NO: 1629 - protein, 13 aa, synthetic construct
  REGION 1..13: note = GFR-binding peptide
FYLVSIANLQVQT

SEQ ID NO: 1630 - protein, 18 aa, synthetic construct
  REGION 1..18: note = GFR-binding peptide
  VARIANT 14..15: note = Xaa is C or S
FYLISIANLDQSVXXPSA

SEQ ID NO: 1631 - protein, 12 aa, synthetic construct
  REGION 1..12: note = GFR-binding peptide
LYLISIASLAQP

SEQ ID NO: 1632 - protein, 16 aa, synthetic construct
  REGION 1..16: note = GFR-binding peptide
  VARIANT 14..15: note = Xaa is C or S
LYLVSIASLKTPVXXA

SEQ ID NO: 1633 - protein, 18 aa, synthetic construct
  REGION 1..18: note = GFR-binding peptide
  VARIANT 14: note = Xaa is C or S
FYLVSIANLKTPAXTPKT

SEQ ID NO: 1634 - protein, 12 aa, synthetic construct
  REGION 1..12: note = GFR-binding peptide
FYLISIANLAQP

SEQ ID NO: 1635 - protein, 12 aa, synthetic construct
  REGION 1..12: note = GFR-binding peptide
KYLVSIPSLKTP

SEQ ID NO: 1636 - protein, 20 aa, synthetic construct
  REGION 1..20: note = GFR-binding peptide
  VARIANT 14..15: note = Xaa is C or S
YYLVSTASLKTPAXXAKPVA

SEQ ID NO: 1637 - protein, 12 aa, synthetic construct
  REGION 1..12: note = GFR-binding peptide
LYLISIASLDQP

SEQ ID NO: 1638 - protein, 10 aa, synthetic construct
  REGION 1..10: note = GFR-binding peptide
YYLVSTASLK

SEQ ID NO: 1639 - protein, 19 aa, synthetic construct
  REGION 1..19: note = GFR-binding peptide
  VARIANT 16: note = Xaa is C or S
FYLVSIANLQVQTPRXQVN

SEQ ID NO: 1640 - protein, 15 aa, synthetic construct
  REGION 1..15: note = GFR-binding peptide
  VARIANT 14..15: note = Xaa is C or S
FYLVSIANLKTPAXX

SEQ ID NO: 1641 - protein, 12 aa, synthetic construct
  REGION 1..12: note = GFR-binding peptide
YYLVSTASLQTP

SEQ ID NO: 1642 - protein, 10 aa, synthetic construct
  REGION 1..10: note = GFR-binding peptide
YYLMSTASLE

SEQ ID NO: 1643 - protein, 18 aa, synthetic construct
  REGION 1..18: note = GFR-binding peptide
  VARIANT 14: note = Xaa is C or S
LYLVSIASLKTPAXTPKT

SEQ ID NO: 1644 - protein, 20 aa, synthetic construct
  REGION 1..20: note = GFR-binding peptide
  VARIANT 16: note = Xaa is C or S
LYLVSIASLQVQTPRXQVNR

SEQ ID NO: 1645 - protein, 19 aa, synthetic construct
  REGION 1..19: note = GFR-binding peptide
  VARIANT 14..15: note = Xaa is C or S
YYLMSTASLETPVXXAKPI

SEQ ID NO: 1646 - protein, 18 aa, synthetic construct
  REGION 1..18: note = GFR-binding peptide
  VARIANT 14..15: note = Xaa is C or S
FYLVSIANLKTPAXXPKP

SEQ ID NO: 1647 - protein, 15 aa, synthetic construct
  REGION 1..15: note = GFR-binding peptide
LYLVSIASLQVQTPR

SEQ ID NO: 1648 - protein, 18 aa, synthetic construct
  REGION 1..18: note = GFR-binding peptide
  VARIANT 14..15: note = Xaa is C or S
LYLISIASLDQSVXXPSA

SEQ ID NO: 1649 - protein, 17 aa, synthetic construct
  REGION 1..17: note = GFR-binding peptide
  VARIANT 14..15: note = Xaa is C or S
LYLVSIASLQTPAXXPK

SEQ ID NO: 1650 - protein, 9 aa, synthetic construct
  REGION 1..9: note = GFR-binding peptide
FYLISIANL

SEQ ID NO: 1651 - protein, 13 aa, synthetic construct
  REGION 1..13: note = GFR-binding peptide
FYLVSIANLKTPA

SEQ ID NO: 1652 - protein, 17 aa, synthetic construct
  REGION 1..17: note = GFR-binding peptide
  VARIANT 14..15: note = Xaa is C or S
YYLVSTASLKTPVXXAK

SEQ ID NO: 1653 - protein, 17 aa, synthetic construct
  REGION 1..17: note = GFR-binding peptide
  VARIANT 14..15: note = Xaa is C or S
KYLISIPSLDQSVXXPS

SEQ ID NO: 1654 - protein, 14 aa, synthetic construct
  REGION 1..14: note = GFR-binding peptide
  VARIANT 14: note = Xaa is C or S
FYLISIANLAQPVX

SEQ ID NO: 1655 - protein, 17 aa, synthetic construct
  REGION 1..17: note = GFR-binding peptide
  VARIANT 14..15: note = Xaa is C or S
LYLVSIASLKTPAXXAK

SEQ ID NO: 1656 - protein, 10 aa, synthetic construct
  REGION 1..10: note = GFR-binding peptide
LYLVSIASLQ

SEQ ID NO: 1657 - protein, 15 aa, synthetic construct
  REGION 1..15: note = GFR-binding peptide
  VARIANT 14..15: note = Xaa is C or S
KYLVSIPSLKTPAXX

SEQ ID NO: 1658 - protein, 11 aa, synthetic construct
  REGION 1..11: note = GFR-binding peptide
LYLVSIASLQV

SEQ ID NO: 1659 - protein, 12 aa, synthetic construct
  REGION 1..12: note = GFR-binding peptide
LYLVSIASLQVQ

SEQ ID NO: 1660 - protein, 14 aa, synthetic construct
  REGION 1..14: note = GFR-binding peptide
  VARIANT 14: note = Xaa is C or S
FYLVSIANLQTPAX

SEQ ID NO: 1661 - protein, 16 aa, synthetic construct
  REGION 1..16: note = GFR-binding peptide
  VARIANT 14..15: note = Xaa is C or S
KYLVSIPSLKTPAXXP

SEQ ID NO: 1662 - protein, 14 aa, synthetic construct
  REGION 1..14: note = GFR-binding peptide
  VARIANT 14: note = Xaa is C or S
YYLVSTASLKTPAX

SEQ ID NO: 1663 - protein, 19 aa, synthetic construct
  REGION 1..19: note = GFR-binding peptide
  VARIANT 14..15: note = Xaa is C or S
KYLISIPSLAQPVXXPAAS

SEQ ID NO: 1664 - protein, 15 aa, synthetic construct
  REGION 1..15: note = GFR-binding peptide
  VARIANT 14..15: note = Xaa is C or S
LYLMSIASLETPVXX

SEQ ID NO: 1665 - protein, 19 aa, synthetic construct
  REGION 1..19: note = GFR-binding peptide
  VARIANT 14..15: note = Xaa is C or S
FYLISIANLAQPVXXPAAS

SEQ ID NO: 1666 - protein, 13 aa, synthetic construct
  REGION 1..13: note = GFR-binding peptide
KYLISIPSLDQPV

SEQ ID NO: 1667 - protein, 19 aa, synthetic construct
  REGION 1..19: note = GFR-binding peptide
  VARIANT 14..15: note = Xaa is C or S
KYLMSIPSLETPVXXAKPI

SEQ ID NO: 1668 - protein, 10 aa, synthetic construct
  REGION 1..10: note = GFR-binding peptide
YYLVSTASLQ

SEQ ID NO: 1669 - protein, 19 aa, synthetic construct
  REGION 1..19: note = GFR-binding peptide
  VARIANT 16: note = Xaa is C or S
YYLVSTASLQVQTPRXQVN

SEQ ID NO: 1670 - protein, 8 aa, synthetic construct
  REGION 1..8: note = GFR-binding peptide
KYLVSIPS

SEQ ID NO: 1671 - protein, 14 aa, synthetic construct
  REGION 1..14: note = GFR-binding peptide
  VARIANT 14: note = Xaa is C or S
KYLVSIPSLQTPAX

SEQ ID NO: 1672 - protein, 12 aa, synthetic construct
  REGION 1..12: note = GFR-binding peptide
FYLMSIANLETP

SEQ ID NO: 1673 - protein, 15 aa, synthetic construct
  REGION 1..15: note = GFR-binding peptide
  VARIANT 14: note = Xaa is C or S
FYLVSIANLKTPAXT

SEQ ID NO: 1674 - protein, 20 aa, synthetic construct
  REGION 1..20: note = GFR-binding peptide
  VARIANT 14: note = Xaa is C or S
FYLVSIANLKTPAXTPKTVH

SEQ ID NO: 1675 - protein, 17 aa, synthetic construct
  REGION 1..17: note = GFR-binding peptide
  VARIANT 14..15: note = Xaa is C or S
YYLISTASLDQPVXXPS

SEQ ID NO: 1676 - protein, 12 aa, synthetic construct
  REGION 1..12: note = GFR-binding peptide
YYLVSTASLQVQ

SEQ ID NO: 1677 - protein, 16 aa, synthetic construct
  REGION 1..16: note = GFR-binding peptide
  VARIANT 14..15: note = Xaa is C or S
KYLMSIPSLETPVXXA

SEQ ID NO: 1678 - protein, 19 aa, synthetic construct
  REGION 1..19: note = GFR-binding peptide
  VARIANT 16: note = Xaa is C or S
LYLVSIASLQVQTPRXQVN

SEQ ID NO: 1679 - protein, 15 aa, synthetic construct
  REGION 1..15: note = GFR-binding peptide
YYLVSTASLQVQTPR

SEQ ID NO: 1680 - protein, 14 aa, synthetic construct
  REGION 1..14: note = GFR-binding peptide
YYLVSTASLQVQTP

SEQ ID NO: 1681 - protein, 16 aa, synthetic construct
  REGION 1..16: note = GFR-binding peptide
  VARIANT 14..15: note = Xaa is C or S
FYLVSIANLKTPAXXP

SEQ ID NO: 1682 - protein, 9 aa, synthetic construct
  REGION 1..9: note = GFR-binding peptide
YYLISTASL

SEQ ID NO: 1683 - protein, 15 aa, synthetic construct
  REGION 1..15: note = GFR-binding peptide
  VARIANT 14..15: note = Xaa is C or S
KYLVSIPSLKTPVXX

SEQ ID NO: 1684 - protein, 18 aa, synthetic construct
  REGION 1..18: note = GFR-binding peptide
  VARIANT 14: note = Xaa is C or S
YYLVSTASLKTPAXTPKT

SEQ ID NO: 1685 - protein, 17 aa, synthetic construct
  REGION 1..17: note = GFR-binding peptide
  VARIANT 14..15: note = Xaa is C or S
YYLMSTASLETPVXXAK

SEQ ID NO: 1686 - protein, 13 aa, synthetic construct
  REGION 1..13: note = GFR-binding peptide
KYLMSIPSLETPV

SEQ ID NO: 1687 - protein, 16 aa, synthetic construct
  REGION 1..16: note = GFR-binding peptide
  VARIANT 16: note = Xaa is C or S
KYLVSIPSLQVQTPRX

SEQ ID NO: 1688 - protein, 13 aa, synthetic construct
  REGION 1..13: note = GFR-binding peptide
FYLVSIANLKTPV

SEQ ID NO: 1689 - protein, 14 aa, synthetic construct
  REGION 1..14: note = GFR-binding peptide
  VARIANT 14: note = Xaa is C or S
KYLISIPSLDQSVX

SEQ ID NO: 1690 - protein, 19 aa, synthetic construct
  REGION 1..19: note = GFR-binding peptide
  VARIANT 14..15: note = Xaa is C or S
FYLVSIANLKTPAXXAKPV

SEQ ID NO: 1691 - protein, 12 aa, synthetic construct
  REGION 1..12: note = GFR-binding peptide
FYLISIANLDQP

SEQ ID NO: 1692 - protein, 14 aa, synthetic construct
  REGION 1..14: note = GFR-binding peptide
  VARIANT 14: note = Xaa is C or S
LYLVSIASLKTPAX

SEQ ID NO: 1693 - protein, 16 aa, synthetic construct
  REGION 1..16: note = GFR-binding peptide
  VARIANT 16: note = Xaa is C or S
FYLVSIANLQVQTPRX

SEQ ID NO: 1694 - protein, 19 aa, synthetic construct
  REGION 1..19: note = GFR-binding peptide
  VARIANT 14..15: note = Xaa is C or S
LYLVSIASLKTPAXXPKPV

SEQ ID NO: 1695 - protein, 19 aa, synthetic construct
  REGION 1..19: note = GFR-binding peptide
  VARIANT 14..15: note = Xaa is C or S
FYLMSIANLETPVXXAKPI

SEQ ID NO: 1696 - protein, 17 aa, synthetic construct
  REGION 1..17: note = GFR-binding peptide
  VARIANT 14..15: note = Xaa is C or S
LYLISIASLDQPVXXPS

SEQ ID NO: 1697 - protein, 14 aa, synthetic construct
  REGION 1..14: note = GFR-binding peptide
  VARIANT 14: note = Xaa is C or S
YYLVSTASLKTPVX

SEQ ID NO: 1698 - protein, 20 aa, synthetic construct
  REGION 1..20: note = GFR-binding peptide
  VARIANT 14..15: note = Xaa is C or S
KYLMSIPSLETPVXXAKPIS

SEQ ID NO: 1699 - protein, 13 aa, synthetic construct
  REGION 1..13: note = GFR-binding peptide
KYLVSIPSLKTPV

SEQ ID NO: 1700 - protein, 19 aa, synthetic construct
  REGION 1..19: note = GFR-binding peptide
  VARIANT 14..15: note = Xaa is C or S
FYLISIANLDQPVXXPSAS

SEQ ID NO: 1701 - protein, 20 aa, synthetic construct
  REGION 1..20: note = GFR-binding peptide
  VARIANT 14..15: note = Xaa is C or S
FYLMSIANLETPVXXAKPIS

SEQ ID NO: 1702 - protein, 19 aa, synthetic construct
  REGION 1..19: note = GFR-binding peptide
  VARIANT 14..15: note = Xaa is C or S
LYLVSIASLKTPVXXAKGV

SEQ ID NO: 1703 - protein, 19 aa, synthetic construct
  REGION 1..19: note = GFR-binding peptide
  VARIANT 14..15: note = Xaa is C or S
KYLVSIPSLKTPAXXAKPV

SEQ ID NO: 1704 - protein, 16 aa, synthetic construct
  REGION 1..16: note = GFR-binding peptide
  VARIANT 14..15: note = Xaa is C or S
FYLMSIANLETPVXXA

SEQ ID NO: 1705 - protein, 17 aa, synthetic construct
  REGION 1..17: note = GFR-binding peptide
  VARIANT 14..15: note = Xaa is C or S
YYLISTASLAQPVXXPA

SEQ ID NO: 1706 - protein, 15 aa, synthetic construct
  REGION 1..15: note = GFR-binding peptide
  VARIANT 14..15: note = Xaa is C or S
LYLISIASLDQPVXX

SEQ ID NO: 1707 - protein, 10 aa, synthetic construct
  REGION 1..10: note = GFR-binding peptide
LYLISIASLD

SEQ ID NO: 1708 - protein, 19 aa, synthetic construct
  REGION 1..19: note = GFR-binding peptide
  VARIANT 14..15: note = Xaa is C or S
KYLISIPSLDQPVXXPSAS

SEQ ID NO: 1709 - protein, 17 aa, synthetic construct
  REGION 1..17: note = GFR-binding peptide
  VARIANT 14..15: note = Xaa is C or S
LYLVSIASLKTPVXXAK

SEQ ID NO: 1710 - protein, 9 aa, synthetic construct
  REGION 1..9: note = GFR-binding peptide
FYLMSIANL

SEQ ID NO: 1711 - protein, 20 aa, synthetic construct
  REGION 1..20: note = GFR-binding peptide
  VARIANT 14..15: note = Xaa is C or S
LYLVSIASLKTPAXXAKPVA

SEQ ID NO: 1712 - protein, 9 aa, synthetic construct
  REGION 1..9: note = GFR-binding peptide
FYLVSIANL

SEQ ID NO: 1713 - protein, 13 aa, synthetic construct
  REGION 1..13: note = GFR-binding peptide
LYLMSIASLETPV

SEQ ID NO: 1714 - protein, 10 aa, synthetic construct
  REGION 1..10: note = GFR-binding peptide
YYLISTASLD

SEQ ID NO: 1715 - protein, 16 aa, synthetic construct
  REGION 1..16: note = GFR-binding peptide
  VARIANT 14..15: note = Xaa is C or S
FYLVSIANLKTPAXXA

SEQ ID NO: 1716 - protein, 16 aa, synthetic construct
  REGION 1..16: note = GFR-binding peptide
  VARIANT 14: note = Xaa is C or S
YYLVSTASLKTPAXTP

SEQ ID NO: 1717 - protein, 11 aa, synthetic construct
  REGION 1..11: note = GFR-binding peptide
YYLVSTASLQT

SEQ ID NO: 1718 - protein, 17 aa, synthetic construct
  REGION 1..17: note = GFR-binding peptide
  VARIANT 14..15: note = Xaa is C or S
LYLISIASLAQPVXXPA

SEQ ID NO: 1719 - protein, 15 aa, synthetic construct
  REGION 1..15: note = GFR-binding peptide
  VARIANT 14..15: note = Xaa is C or S
LYLVSIASLKTPVXX

SEQ ID NO: 1720 - protein, 16 aa, synthetic construct
  REGION 1..16: note = GFR-binding peptide
  VARIANT 14: note = Xaa is C or S
LYLVSIASLKTPAXTP

SEQ ID NO: 1721 - protein, 14 aa, synthetic construct
  REGION 1..14: note = GFR-binding peptide
  VARIANT 14: note = Xaa is C or S
LYLISIASLDQSVX

SEQ ID NO: 1722 - protein, 15 aa, synthetic construct
  REGION 1..15: note = GFR-binding peptide
  VARIANT 14..15: note = Xaa is C or S
FYLVSIANLKTPVXX

SEQ ID NO: 1723 - protein, 19 aa, synthetic construct
  REGION 1..19: note = GFR-binding peptide
  VARIANT 14..15: note = Xaa is C or S
YYLVSTASLKTPVXXAKGV

SEQ ID NO: 1724 - protein, 9 aa, synthetic construct
  REGION 1..9: note = GFR-binding peptide
LYLVSIASL

SEQ ID NO: 1725 - protein, 16 aa, synthetic construct
  REGION 1..16: note = GFR-binding peptide
  VARIANT 14: note = Xaa is C or S
FYLVSIANLKTPAXTP

SEQ ID NO: 1726 - protein, 11 aa, synthetic construct
  REGION 1..11: note = GFR-binding peptide
KYLVSIPSLQV

SEQ ID NO: 1727 - protein, 11 aa, synthetic construct
  REGION 1..11: note = GFR-binding peptide
LYLISIASLAQ

SEQ ID NO: 1728 - protein, 11 aa, synthetic construct
  REGION 1..11: note = GFR-binding peptide
KYLVSIPSLQT

SEQ ID NO: 1729 - protein, 19 aa, synthetic construct
  REGION 1..19: note = GFR-binding peptide
  VARIANT 14..15: note = Xaa is C or S
FYLVSIANLQTPAXXPKPV

SEQ ID NO: 1730 - protein, 20 aa, synthetic construct
  REGION 1..20: note = GFR-binding peptide
  VARIANT 14..15: note = Xaa is C or S
YYLISTASLDQPVXXPSASA

SEQ ID NO: 1731 - protein, 17 aa, synthetic construct
  REGION 1..17: note = GFR-binding peptide
  VARIANT 14..15: note = Xaa is C or S
LYLMSIASLETPVXXAK

SEQ ID NO: 1732 - protein, 16 aa, synthetic construct
  REGION 1..16: note = GFR-binding peptide
  VARIANT 14..15: note = Xaa is C or S
LYLISIASLDQPVXXP

SEQ ID NO: 1733 - protein, 17 aa, synthetic construct
  REGION 1..17: note = GFR-binding peptide
  VARIANT 14..15: note = Xaa is C or S
YYLVSTASLKTPAXXPK

SEQ ID NO: 1734 - protein, 15 aa, synthetic construct
  REGION 1..15: note = GFR-binding peptide
  VARIANT 14..15: note = Xaa is C or S
YYLVSTASLKTPVXX

SEQ ID NO: 1735 - protein, 20 aa, synthetic construct
  REGION 1..20: note = GFR-binding peptide
  VARIANT 14..15: note = Xaa is C or S
LYLVSIASLKTPVXXAKGVK

SEQ ID NO: 1736 - protein, 19 aa, synthetic construct
  REGION 1..19: note = GFR-binding peptide
  VARIANT 14..15: note = Xaa is C or S
KYLVSIPSLQTPAXXPKPV

SEQ ID NO: 1737 - protein, 11 aa, synthetic construct
  REGION 1..11: note = GFR-binding peptide
FYLVSIANLQT

SEQ ID NO: 1738 - protein, 20 aa, synthetic construct
  REGION 1..20: note = GFR-binding peptide
  VARIANT 14..15: note = Xaa is C or S
LYLISIASLDQSVXXPSASA

SEQ ID NO: 1739 - protein, 19 aa, synthetic construct
  REGION 1..19: note = GFR-binding peptide
  VARIANT 14..15: note = Xaa is C or S
FYLVSIANLKTPAXXPKPV

SEQ ID NO: 1740 - protein, 20 aa, synthetic construct
  REGION 1..20: note = GFR-binding peptide
  VARIANT 14..15: note = Xaa is C or S
FYLVSIANLQTPAXXPKPVT

SEQ ID NO: 1741 - protein, 18 aa, synthetic construct
  REGION 1..18: note = GFR-binding peptide
  VARIANT 14..15: note = Xaa is C or S
FYLISIANLAQPVXXPAA

SEQ ID NO: 1742 - protein, 16 aa, synthetic construct
  REGION 1..16: note = GFR-binding peptide
  VARIANT 14..15: note = Xaa is C or S
KYLVSIPSLKTPAXXA

SEQ ID NO: 1743 - protein, 16 aa, synthetic construct
  REGION 1..16: note = GFR-binding peptide
  VARIANT 14: note = Xaa is C or S
KYLVSIPSLKTPAXTP

SEQ ID NO: 1744 - protein, 15 aa, synthetic construct
  REGION 1..15: note = GFR-binding peptide
  VARIANT 14..15: note = Xaa is C or S
FYLISIANLDQSVXX

SEQ ID NO: 1745 - protein, 19 aa, synthetic construct
  REGION 1..19: note = GFR-binding peptide
  VARIANT 14..15: note = Xaa is C or S
KYLVSIPSLKTPAXXPKPV

SEQ ID NO: 1746 - protein, 9 aa, synthetic construct
  REGION 1..9: note = GFR-binding peptide
KYLVSIPSL

SEQ ID NO: 1747 - protein, 17 aa, synthetic construct
  REGION 1..17: note = GFR-binding peptide
  VARIANT 14: note = Xaa is C or S
FYLVSIANLKTPAXTPK

SEQ ID NO: 1748 - protein, 17 aa, synthetic construct
  REGION 1..17: note = GFR-binding peptide
  VARIANT 14..15: note = Xaa is C or S
KYLVSIPSLKTPVXXAK

SEQ ID NO: 1749 - protein, 13 aa, synthetic construct
  REGION 1..13: note = GFR-binding peptide
LYLVSIASLKTPV

SEQ ID NO: 1750 - protein, 17 aa, synthetic construct
  REGION 1..17: note = GFR-binding peptide
  VARIANT 14..15: note = Xaa is C or S
YYLVSTASLKTPAXXAK

SEQ ID NO: 1751 - protein, 16 aa, synthetic construct
  REGION 1..16: note = GFR-binding peptide
  VARIANT 14..15: note = Xaa is C or S
LYLVSIASLKTPAXXP

SEQ ID NO: 1752 - protein, 15 aa, synthetic construct
  REGION 1..15: note = GFR-binding peptide
  VARIANT 14..15: note = Xaa is C or S
YYLISTASLDQPVXX

SEQ ID NO: 1753 - protein, 13 aa, synthetic construct
  REGION 1..13: note = GFR-binding peptide
YYLISTASLDQPV

SEQ ID NO: 1754 - protein, 18 aa, synthetic construct
  REGION 1..18: note = GFR-binding peptide
  VARIANT 14..15: note = Xaa is C or S
YYLVSTASLKTPAXXAKP

SEQ ID NO: 1755 - protein, 12 aa, synthetic construct
  REGION 1..12: note = GFR-binding peptide
KYLVSIPSLQVQ

SEQ ID NO: 1756 - protein, 11 aa, synthetic construct
  REGION 1..11: note = GFR-binding peptide
FYLISIANLAQ

SEQ ID NO: 1757 - protein, 20 aa, synthetic construct
  REGION 1..20: note = GFR-binding peptide
  VARIANT 14..15: note = Xaa is C or S
FYLISIANLDQSVXXPSASA

SEQ ID NO: 1758 - protein, 14 aa, synthetic construct
  REGION 1..14: note = GFR-binding peptide
LYLVSIASLQVQTP

SEQ ID NO: 1759 - protein, 10 aa, synthetic construct
  REGION 1..10: note = GFR-binding peptide
KYLVSIPSLQ

SEQ ID NO: 1760 - protein, 11 aa, synthetic construct
  REGION 1..11: note = GFR-binding peptide
LYLVSIASLQT

SEQ ID NO: 1761 - protein, 13 aa, synthetic construct
  REGION 1..13: note = GFR-binding peptide
FYLISIANLDQSV

SEQ ID NO: 1762 - protein, 14 aa, synthetic construct
  REGION 1..14: note = GFR-binding peptide
  VARIANT 14: note = Xaa is C or S
LYLVSIASLQTPAX

SEQ ID NO: 1763 - protein, 11 aa, synthetic construct
  REGION 1..11: note = GFR-binding peptide
LYLISIASLDQ

SEQ ID NO: 1764 - protein, 16 aa, synthetic construct
  REGION 1..16: note = GFR-binding peptide
  VARIANT 14..15: note = Xaa is C or S
KYLISIPSLDQPVXXP

SEQ ID NO: 1765 - protein, 15 aa, synthetic construct
  REGION 1..15: note = GFR-binding peptide
  VARIANT 14..15: note = Xaa is C or S
KYLISIPSLDQSVXX

SEQ ID NO: 1766 - protein, 18 aa, synthetic construct
  REGION 1..18: note = GFR-binding peptide
  VARIANT 14..15: note = Xaa is C or S
FYLISIANLDQPVXXPSA

SEQ ID NO: 1767 - protein, 11 aa, synthetic construct
  REGION 1..11: note = GFR-binding peptide
KYLISIPSLAQ

SEQ ID NO: 1768 - protein, 20 aa, synthetic construct
  REGION 1..20: note = GFR-binding peptide
  VARIANT 14..15: note = Xaa is C or S
KYLISIPSLDQSVXXPSASA

SEQ ID NO: 1769 - protein, 15 aa, synthetic construct
  REGION 1..15: note = GFR-binding peptide
  VARIANT 14..15: note = Xaa is C or S
YYLMSTASLETPVXX

SEQ ID NO: 1770 - protein, 17 aa, synthetic construct
  REGION 1..17: note = GFR-binding peptide
  VARIANT 14: note = Xaa is C or S
KYLVSIPSLKTPAXTPK

SEQ ID NO: 1771 - protein, 14 aa, synthetic construct
  REGION 1..14: note = GFR-binding peptide
  VARIANT 14: note = Xaa is C or S
YYLISTASLDQSVX

SEQ ID NO: 1772 - protein, 13 aa, synthetic construct
  REGION 1..13: note = GFR-binding peptide
KYLISIPSLDQSV

SEQ ID NO: 1773 - protein, 16 aa, synthetic construct
  REGION 1..16: note = GFR-binding peptide
  VARIANT 14..15: note = Xaa is C or S
FYLISIANLDQPVXXP

SEQ ID NO: 1774 - protein, 13 aa, synthetic construct
  REGION 1..13: note = GFR-binding peptide
YYLMSTASLETPV

SEQ ID NO: 1775 - protein, 14 aa, synthetic construct
  REGION 1..14: note = GFR-binding peptide
  VARIANT 14: note = Xaa is C or S
YYLVSTASLQTPAX

SEQ ID NO: 1776 - protein, 9 aa, synthetic construct
  REGION 1..9: note = GFR-binding peptide
KYLISIPSL

SEQ ID NO: 1777 - protein, 16 aa, synthetic construct
  REGION 1..16: note = GFR-binding peptide
  VARIANT 16: note = Xaa is C or S
YYLVSTASLQVQTPRX

SEQ ID NO: 1778 - protein, 15 aa, synthetic construct
  REGION 1..15: note = GFR-binding peptide
  VARIANT 14..15: note = Xaa is C or S
KYLISIPSLAQPVXX

SEQ ID NO: 1779 - protein, 16 aa, synthetic construct
  REGION 1..16: note = GFR-binding peptide
  VARIANT 14..15: note = Xaa is C or S
KYLVSIPSLQTPAXXP

SEQ ID NO: 1780 - protein, 10 aa, synthetic construct
  REGION 1..10: note = GFR-binding peptide
FYLVSIANLQ

SEQ ID NO: 1781 - protein, 12 aa, synthetic construct
  REGION 1..12: note = GFR-binding peptide
FYLVSIANLQVQ

SEQ ID NO: 1782 - protein, 16 aa, synthetic construct
  REGION 1..16: note = GFR-binding peptide
  VARIANT 14..15: note = Xaa is C or S
YYLMSTASLETPVXXA

SEQ ID NO: 1783 - protein, 19 aa, synthetic construct
  REGION 1..19: note = GFR-binding peptide
  VARIANT 14..15: note = Xaa is C or S
FYLISIANLDQSVXXPSAS

SEQ ID NO: 1784 - protein, 17 aa, synthetic construct
  REGION 1..17: note = GFR-binding peptide
  VARIANT 14: note = Xaa is C or S
YYLVSTASLKTPAXTPK

SEQ ID NO: 1785 - protein, 18 aa, synthetic construct
  REGION 1..18: note = GFR-binding peptide
  VARIANT 14..15: note = Xaa is C or S
KYLISIPSLAQPVXXPAA

SEQ ID NO: 1786 - protein, 14 aa, synthetic construct
  REGION 1..14: note = GFR-binding peptide
KYLVSIPSLQVQTP

SEQ ID NO: 1787 - protein, 13 aa, synthetic construct
  REGION 1..13: note = GFR-binding peptide
YYLVSTASLKTPV

SEQ ID NO: 1788 - protein, 20 aa, synthetic construct
  REGION 1..20: note = GFR-binding peptide
  VARIANT 14..15: note = Xaa is C or S
LYLVSIASLKTPAXXPKPVY

SEQ ID NO: 1789 - protein, 16 aa, synthetic construct
  REGION 1..16: note = GFR-binding peptide
  VARIANT 14..15: note = Xaa is C or S
FYLISIANLAQPVXXP

SEQ ID NO: 1790 - protein, 10 aa, synthetic construct
  REGION 1..10: note = GFR-binding peptide
LYLVSIASLK

SEQ ID NO: 1791 - protein, 20 aa, synthetic construct
  REGION 1..20: note = GFR-binding peptide
  VARIANT 14..15: note = Xaa is C or S
LYLMSIASLETPVXXAKPIS

SEQ ID NO: 1792 - protein, 9 aa, synthetic construct
  REGION 1..9: note = GFR-binding peptide
LYLMSIASL

SEQ ID NO: 1793 - protein, 14 aa, synthetic construct
  REGION 1..14: note = GFR-binding peptide
  VARIANT 14: note = Xaa is C or S
KYLVSIPSLKTPAX

SEQ ID NO: 1794 - protein, 15 aa, synthetic construct
  REGION 1..15: note = GFR-binding peptide
  VARIANT 14..15: note = Xaa is C or S
LYLISIASLDQSVXX

SEQ ID NO: 1795 - protein, 15 aa, synthetic construct
  REGION 1..15: note = GFR-binding peptide
  VARIANT 14..15: note = Xaa is C or S
YYLVSTASLKTPAXX

SEQ ID NO: 1796 - protein, 10 aa, synthetic construct
  REGION 1..10: note = GFR-binding peptide
LYLMSIASLE

SEQ ID NO: 1797 - protein, 18 aa, synthetic construct
  REGION 1..18: note = GFR-binding peptide
  VARIANT 14..15: note = Xaa is C or S
KYLVSIPSLQTPAXXPKP

SEQ ID NO: 1798 - protein, 13 aa, synthetic construct
  REGION 1..13: note = GFR-binding peptide
KYLVSIPSLQTPA

SEQ ID NO: 1799 - protein, 18 aa, synthetic construct
  REGION 1..18: note = GFR-binding peptide
  VARIANT 14..15: note = Xaa is C or S
YYLISTASLDQSVXXPSA

SEQ ID NO: 1800 - protein, 10 aa, synthetic construct
  REGION 1..10: note = GFR-binding peptide
KYLISIPSLA

SEQ ID NO: 1801 - protein, 19 aa, synthetic construct
  REGION 1..19: note = GFR-binding peptide
  VARIANT 14..15: note = Xaa is C or S
LYLMSIASLETPVXXAKPI

SEQ ID NO: 1802 - protein, 18 aa, synthetic construct
  REGION 1..18: note = GFR-binding peptide
  VARIANT 14..15: note = Xaa is C or S
YYLMSTASLETPVXXAKP

SEQ ID NO: 1803 - protein, 17 aa, synthetic construct
  REGION 1..17: note = GFR-binding peptide
  VARIANT 14..15: note = Xaa is C or S
KYLVSIPSLKTPAXXAK

SEQ ID NO: 1804 - protein, 12 aa, synthetic construct
  REGION 1..12: note = GFR-binding peptide
YYLISTASLAQP

SEQ ID NO: 1805 - protein, 14 aa, synthetic construct
  REGION 1..14: note = GFR-binding peptide
  VARIANT 14: note = Xaa is C or S
YYLISTASLAQPVX

SEQ ID NO: 1806 - protein, 13 aa, synthetic construct
  REGION 1..13: note = GFR-binding peptide
YYLVSTASLKTPA

SEQ ID NO: 1807 - protein, 12 aa, synthetic construct
  REGION 1..12: note = GFR-binding peptide
KYLISIPSLDQP

SEQ ID NO: 1808 - protein, 13 aa, synthetic construct
  REGION 1..13: note = GFR-binding peptide
KYLISIPSLAQPV

SEQ ID NO: 1809 - protein, 20 aa, synthetic construct
  REGION 1..20: note = GFR-binding peptide
  VARIANT 14..15: note = Xaa is C or S
YYLISTASLAQPVXXPAASA

SEQ ID NO: 1810 - protein, 13 aa, synthetic construct
  REGION 1..13: note = GFR-binding peptide
YYLVSTASLQVQT

SEQ ID NO: 1811 - protein, 15 aa, synthetic construct
  REGION 1..15: note = GFR-binding peptide
  VARIANT 14..15: note = Xaa is C or S
KYLVSIPSLQTPAXX

SEQ ID NO: 1812 - protein, 11 aa, synthetic construct
  REGION 1..11: note = GFR-binding peptide
YYLMSTASLET

SEQ ID NO: 1813 - protein, 19 aa, synthetic construct
  REGION 1..19: note = GFR-binding peptide
  VARIANT 14..15: note = Xaa is C or S
LYLISIASLAQPVXXPAAS

SEQ ID NO: 1814 - protein, 15 aa, synthetic construct
  REGION 1..15: note = GFR-binding peptide
  VARIANT 14..15: note = Xaa is C or S
FYLMSIANLETPVXX

SEQ ID NO: 1815 - protein, 18 aa, synthetic construct
  REGION 1..18: note = GFR-binding peptide
  VARIANT 14..15: note = Xaa is C or S
YYLVSTASLKTPAXXPKP

SEQ ID NO: 1816 - protein, 14 aa, synthetic construct
  REGION 1..14: note = GFR-binding peptide
  VARIANT 14: note = Xaa is C or S
KYLISIPSLDQPVX

SEQ ID NO: 1817 - protein, 20 aa, synthetic construct
  REGION 1..20: note = GFR-binding peptide
  VARIANT 14..15: note = Xaa is C or S
LYLISIASLDQPVXXPSASA

SEQ ID NO: 1818 - protein, 19 aa, synthetic construct
  REGION 1..19: note = GFR-binding peptide
  VARIANT 14: note = Xaa is C or S
KYLVSIPSLKTPAXTPKTV

SEQ ID NO: 1819 - protein, 15 aa, synthetic construct
  REGION 1..15: note = GFR-binding peptide
  VARIANT 14: note = Xaa is C or S
LYLVSIASLKTPAXT

SEQ ID NO: 1820 - protein, 18 aa, synthetic construct
  REGION 1..18: note = GFR-binding peptide
  VARIANT 14..15: note = Xaa is C or S
KYLVSIPSLKTPAXXAKP

SEQ ID NO: 1821 - protein, 12 aa, synthetic construct
  REGION 1..12: note = GFR-binding peptide
LYLVSIASLKTP

SEQ ID NO: 1822 - protein, 12 aa, synthetic construct
  REGION 1..12: note = GFR-binding peptide
FYLVSIANLQTP

SEQ ID NO: 1823 - protein, 15 aa, synthetic construct
  REGION 1..15: note = GFR-binding peptide
  VARIANT 14..15: note = Xaa is C or S
KYLISIPSLDQPVXX

SEQ ID NO: 1824 - protein, 15 aa, synthetic construct
  REGION 1..15: note = GFR-binding peptide
KYLVSIPSLQVQTPR

SEQ ID NO: 1825 - protein, 17 aa, synthetic construct
  REGION 1..17: note = GFR-binding peptide
  VARIANT 16: note = Xaa is C or S
FYLVSIANLQVQTPRXQ

SEQ ID NO: 1826 - protein, 13 aa, synthetic construct
  REGION 1..13: note = GFR-binding peptide
FYLMSIANLETPV

SEQ ID NO: 1827 - protein, 19 aa, synthetic construct
  REGION 1..19: note = GFR-binding peptide
  VARIANT 14..15: note = Xaa is C or S
YYLVSTASLKTPAXXPKPV

SEQ ID NO: 1828 - protein, 20 aa, synthetic construct
  REGION 1..20: note = GFR-binding peptide
  VARIANT 14..15: note = Xaa is C or S
KYLISIPSLAQPVXXPAASA

SEQ ID NO: 1829 - protein, 18 aa, synthetic construct
  REGION 1..18: note = GFR-binding peptide
  VARIANT 14..15: note = Xaa is C or S
YYLVSTASLQTPAXXPKP

SEQ ID NO: 1830 - protein, 20 aa, synthetic construct
  REGION 1..20: note = GFR-binding peptide
  VARIANT 14..15: note = Xaa is C or S
KYLMSIPSLETPVXXAKPIK

SEQ ID NO: 1831 - protein, 17 aa, synthetic construct
  REGION 1..17: note = GFR-binding peptide
  VARIANT 14..15: note = Xaa is C or S
YYLVSTASLQTPAXXPK

SEQ ID NO: 1832 - protein, 16 aa, synthetic construct
  REGION 1..16: note = GFR-binding peptide
  VARIANT 14..15: note = Xaa is C or S
KYLVSIPSLKTPVXXA

SEQ ID NO: 1833 - protein, 20 aa, synthetic construct
  REGION 1..20: note = GFR-binding peptide
  VARIANT 14..15: note = Xaa is C or S
YYLISTASLDQSVXXPSASA

SEQ ID NO: 1834 - protein, 19 aa, synthetic construct
  REGION 1..19: note = GFR-binding peptide
  VARIANT 14..15: note = Xaa is C or S
KYLVSIPSLKTPVXXAKGV

SEQ ID NO: 1835 - protein, 16 aa, synthetic construct
  REGION 1..16: note = GFR-binding peptide
  VARIANT 14..15: note = Xaa is C or S
YYLVSTASLKTPVXXA

SEQ ID NO: 1836 - protein, 12 aa, synthetic construct
  REGION 1..12: note = GFR-binding peptide
KYLISIPSLDQS

SEQ ID NO: 1837 - protein, 8 aa, synthetic construct
  REGION 1..8: note = GFR-binding peptide
YYLVSTAS

SEQ ID NO: 1838 - protein, 20 aa, synthetic construct
  REGION 1..20: note = GFR-binding peptide
  VARIANT 14..15: note = Xaa is C or S
YYLMSTASLETPVXXAKPIK

SEQ ID NO: 1839 - protein, 17 aa, synthetic construct
  REGION 1..17: note = GFR-binding peptide
  VARIANT 14..15: note = Xaa is C or S
KYLVSIPSLKTPAXXPK

SEQ ID NO: 1840 - protein, 17 aa, synthetic construct
  REGION 1..17: note = GFR-binding peptide
  VARIANT 14..15: note = Xaa is C or S
KYLVSIPSLQTPAXXPK

SEQ ID NO: 1841 - protein, 12 aa, synthetic construct
  REGION 1..12: note = GFR-binding peptide
YYLISTASLDQP

SEQ ID NO: 1842 - protein, 16 aa, synthetic construct
  REGION 1..16: note = GFR-binding peptide
  VARIANT 14..15: note = Xaa is C or S
FYLISIANLDQSVXXP

SEQ ID NO: 1843 - protein, 14 aa, synthetic construct
  REGION 1..14: note = GFR-binding peptide
  VARIANT 14: note = Xaa is C or S
YYLISTASLDQPVX

SEQ ID NO: 1844 - protein, 14 aa, synthetic construct
  REGION 1..14: note = GFR-binding peptide
  VARIANT 14: note = Xaa is C or S
KYLISIPSLAQPVX

SEQ ID NO: 1845 - protein, 18 aa, synthetic construct
  REGION 1..18: note = GFR-binding peptide
  VARIANT 16: note = Xaa is C or S
KYLVSIPSLQVQTPRXQV

SEQ ID NO: 1846 - protein, 14 aa, synthetic construct
  REGION 1..14: note = GFR-binding peptide
  VARIANT 14: note = Xaa is C or S
FYLMSIANLETPVX

SEQ ID NO: 1847 - protein, 13 aa, synthetic construct
  REGION 1..13: note = GFR-binding peptide
KYLVSIPSLQVQT

SEQ ID NO: 1848 - protein, 17 aa, synthetic construct
  REGION 1..17: note = GFR-binding peptide
  VARIANT 14..15: note = Xaa is C or S
LYLISIASLDQSVXXPS

SEQ ID NO: 1849 - protein, 9 aa, synthetic construct
  REGION 1..9: note = GFR-binding peptide
YYLVSTASL

SEQ ID NO: 1850 - protein, 20 aa, synthetic construct
  REGION 1..20: note = GFR-binding peptide
  VARIANT 14..15: note = Xaa is C or S
FYLISIANLDQPVXXPSASA

SEQ ID NO: 1851 - protein, 18 aa, synthetic construct
  REGION 1..18: note = GFR-binding peptide
  VARIANT 14: note = Xaa is C or S
KYLVSIPSLKTPAXTPKT

SEQ ID NO: 1852 - protein, 12 aa, synthetic construct
  REGION 1..12: note = GFR-binding peptide
LYLVSIASLQTP

SEQ ID NO: 1853 - protein, 11 aa, synthetic construct
  REGION 1..11: note = GFR-binding peptide
YYLVSTASLKT

SEQ ID NO: 1854 - protein, 18 aa, synthetic construct
  REGION 1..18: note = GFR-binding peptide
  VARIANT 14..15: note = Xaa is C or S
KYLVSIPSLKTPAXXPKP

SEQ ID NO: 1855 - protein, 14 aa, synthetic construct
  REGION 1..14: note = GFR-binding peptide
  VARIANT 14: note = Xaa is C or S
FYLVSIANLKTPVX

SEQ ID NO: 1856 - protein, 10 aa, synthetic construct
  REGION 1..10: note = GFR-binding peptide
KYLISIPSLD

SEQ ID NO: 1857 - protein, 15 aa, synthetic construct
  REGION 1..15: note = GFR-binding peptide
  VARIANT 14..15: note = Xaa is C or S
YYLVSTASLQTPAXX

SEQ ID NO: 1858 - protein, 14 aa, synthetic construct
  REGION 1..14: note = GFR-binding peptide
  VARIANT 14: note = Xaa is C or S
LYLVSIASLKTPVX

SEQ ID NO: 1859 - protein, 19 aa, synthetic construct
  REGION 1..19: note = GFR-binding peptide
  VARIANT 14..15: note = Xaa is C or S
YYLVSTASLKTPAXXAKPV

SEQ ID NO: 1860 - protein, 13 aa, synthetic construct
  REGION 1..13: note = GFR-binding peptide
KYLVSIPSLKTPA

SEQ ID NO: 1861 - protein, 19 aa, synthetic construct
  REGION 1..19: note = GFR-binding peptide
  VARIANT 14: note = Xaa is C or S
YYLVSTASLKTPAXTPKTV

SEQ ID NO: 1862 - protein, 16 aa, synthetic construct
  REGION 1..16: note = GFR-binding peptide
  VARIANT 14..15: note = Xaa is C or S
LYLISIASLDQSVXXP

SEQ ID NO: 1863 - protein, 13 aa, synthetic construct
  REGION 1..13: note = GFR-binding peptide
YYLVSTASLQTPA

SEQ ID NO: 1864 - protein, 19 aa, synthetic construct
  REGION 1..19: note = GFR-binding peptide
  VARIANT 16: note = Xaa is C or S
KYLVSIPSLQVQTPRXQVN

SEQ ID NO: 1865 - protein, 12 aa, synthetic construct
  REGION 1..12: note = GFR-binding peptide
FYLVSIANLKTP

SEQ ID NO: 1866 - protein, 17 aa, synthetic construct
  REGION 1..17: note = GFR-binding peptide
  VARIANT 14..15: note = Xaa is C or S
FYLISIANLDQSVXXPS

SEQ ID NO: 1867 - protein, 12 aa, synthetic construct
  REGION 1..12: note = GFR-binding peptide
LYLMSIASLETP

SEQ ID NO: 1868 - protein, 11 aa, synthetic construct
  REGION 1..11: note = GFR-binding peptide
YYLVSTASLQV

SEQ ID NO: 1869 - protein, 14 aa, synthetic construct
  REGION 1..14: note = GFR-binding peptide
  VARIANT 14: note = Xaa is C or S
LYLMSIASLETPVX

SEQ ID NO: 1870 - protein, 13 aa, synthetic construct
  REGION 1..13: note = GFR-binding peptide
APTKLSPISVLFI

SEQ ID NO: 1871 - protein, 13 aa, synthetic construct
  REGION 1..13: note = GFR-binding peptide
APTQLSAISVLYL

SEQ ID NO: 1872 - protein, 14 aa, synthetic construct
  REGION 1..14: note = GFR-binding peptide
  VARIANT 1: note = Xaa is C or S
XVPQALSPISILFI

SEQ ID NO: 1873 - protein, 20 aa, synthetic construct
  REGION 1..20: note = GFR-binding peptide
  VARIANT 7: note = Xaa is C or S
HVTKPTXAPTKLSPISVLFI

SEQ ID NO: 1874 - protein, 11 aa, synthetic construct
  REGION 1..11: note = GFR-binding peptide
TQLEPLTVLYY

SEQ ID NO: 1875 - protein, 13 aa, synthetic construct
  REGION 1..13: note = GFR-binding peptide
VPQDLEPLPIVYY

SEQ ID NO: 1876 - protein, 19 aa, synthetic construct
  REGION 1..19: note = GFR-binding peptide
  VARIANT 5..6: note = Xaa is C or S
VPKPXXAPTKLEPLTVLYY

SEQ ID NO: 1877 - protein, 19 aa, synthetic construct
  REGION 1..19: note = GFR-binding peptide
  VARIANT 5..6: note = Xaa is C or S
SASPXXVSQDLSAISILYL

SEQ ID NO: 1878 - protein, 17 aa, synthetic construct
  REGION 1..17: note = GFR-binding peptide
  VARIANT 3..4: note = Xaa is C or S
KPXXAPTQLEPLTVLYY

SEQ ID NO: 1879 - protein, 18 aa, synthetic construct
  REGION 1..18: note = GFR-binding peptide
  VARIANT 5: note = Xaa is C or S
TKPTXAPTKLEPLTVLYY

SEQ ID NO: 1880 - protein, 11 aa, synthetic construct
  REGION 1..11: note = GFR-binding peptide
QDLNAISILYF

SEQ ID NO: 1881 - protein, 16 aa, synthetic construct
  REGION 1..16: note = GFR-binding peptide
  VARIANT 2..3: note = Xaa is C or S
PXXAPTKLEPLPVVYY

SEQ ID NO: 1882 - protein, 13 aa, synthetic construct
  REGION 1..13: note = GFR-binding peptide
VPTRLSAISILYL

SEQ ID NO: 1883 - protein, 16 aa, synthetic construct
  REGION 1..16: note = GFR-binding peptide
  VARIANT 3: note = Xaa is C or S
PTXAPTKLEPLTVLYY

SEQ ID NO: 1884 - protein, 13 aa, synthetic construct
  REGION 1..13: note = GFR-binding peptide
VPQALSAISILYL

SEQ ID NO: 1885 - protein, 10 aa, synthetic construct
  REGION 1..10: note = GFR-binding peptide
ALSAISILYL

SEQ ID NO: 1886 - protein, 19 aa, synthetic construct
  REGION 1..19: note = GFR-binding peptide
  VARIANT 5..6: note = Xaa is C or S
SASPXXVPQDLSPISILFI

SEQ ID NO: 1887 - protein, 9 aa, synthetic construct
  REGION 1..9: note = GFR-binding peptide
LEPLPVVYY

SEQ ID NO: 1888 - protein, 20 aa, synthetic construct
  REGION 1..20: note = GFR-binding peptide
  VARIANT 6..7: note = Xaa is C or S
YVPKPXXAPTKLSPISVLFI

SEQ ID NO: 1889 - protein, 16 aa, synthetic construct
  REGION 1..16: note = GFR-binding peptide
  VARIANT 2..3: note = Xaa is C or S
AXXVPTELSPISMLFI

SEQ ID NO: 1890 - protein, 20 aa, synthetic construct
  REGION 1..20: note = GFR-binding peptide
  VARIANT 6..7: note = Xaa is C or S
SIPKAXXVPTELSPISMLFI

SEQ ID NO: 1891 - protein, 10 aa, synthetic construct
  REGION 1..10: note = GFR-binding peptide
DLEPLPIVYY

SEQ ID NO: 1892 - protein, 13 aa, synthetic construct
  REGION 1..13: note = GFR-binding peptide
VPTELEPLTMLYY

SEQ ID NO: 1893 - protein, 11 aa, synthetic construct
  REGION 1..11: note = GFR-binding peptide
TRLEPLPIVYY

SEQ ID NO: 1894 - protein, 19 aa, synthetic construct
  REGION 1..19: note = GFR-binding peptide
  VARIANT 5..6: note = Xaa is C or S
VPKPXXAPTKLEPLPVVYY

SEQ ID NO: 1895 - protein, 15 aa, synthetic construct
  REGION 1..15: note = GFR-binding peptide
  VARIANT 1..2: note = Xaa is C or S
XXVPTELEPLTMLYY

SEQ ID NO: 1896 - protein, 9 aa, synthetic construct
  REGION 1..9: note = GFR-binding peptide
LSPISMLFI

SEQ ID NO: 1897 - protein, 15 aa, synthetic construct
  REGION 1..15: note = GFR-binding peptide
  VARIANT 1..2: note = Xaa is C or S
XXVSQDLSPISILFI

SEQ ID NO: 1898 - protein, 16 aa, synthetic construct
  REGION 1..16: note = GFR-binding peptide
  VARIANT 2..3: note = Xaa is C or S
PXXVPQDLEPLPIVYY

SEQ ID NO: 1899 - protein, 11 aa, synthetic construct
  REGION 1..11: note = GFR-binding peptide
TQLEPLPVVYY

SEQ ID NO: 1900 - protein, 10 aa, synthetic construct
  REGION 1..10: note = GFR-binding peptide
ELNAISMLYF

SEQ ID NO: 1901 - protein, 17 aa, synthetic construct
  REGION 1..17: note = GFR-binding peptide
  VARIANT 4: note = Xaa is C or S
KPTXAPTKLSPISVLFI

SEQ ID NO: 1902 - protein, 20 aa, synthetic construct
  REGION 1..20: note = GFR-binding peptide
  VARIANT 6..7: note = Xaa is C or S
STPPTXXVPTRLSAISILYL

SEQ ID NO: 1903 - protein, 17 aa, synthetic construct
  REGION 1..17: note = GFR-binding peptide
  VARIANT 3..4: note = Xaa is C or S
KPXXAPTQLEPLPVVYY

SEQ ID NO: 1904 - protein, 12 aa, synthetic construct
  REGION 1..12: note = GFR-binding peptide
SQDLSAISILYL

SEQ ID NO: 1905 - protein, 14 aa, synthetic construct
  REGION 1..14: note = GFR-binding peptide
  VARIANT 1: note = Xaa is C or S
XAPTQLEPLPVVYY

SEQ ID NO: 1906 - protein, 17 aa, synthetic construct
  REGION 1..17: note = GFR-binding peptide
  VARIANT 4: note = Xaa is C or S
KPTXAPTKLEPLPVVYY

SEQ ID NO: 1907 - protein, 19 aa, synthetic construct
  REGION 1..19: note = GFR-binding peptide
  VARIANT 5..6: note = Xaa is C or S
IPKAXXVPTELSPISMLFI

SEQ ID NO: 1908 - protein, 10 aa, synthetic construct
  REGION 1..10: note = GFR-binding peptide
RLEPLTILYY

SEQ ID NO: 1909 - protein, 19 aa, synthetic construct
  REGION 1..19: note = GFR-binding peptide
  VARIANT 5..6: note = Xaa is C or S
TPPTXXVPTRLSAISILYL

SEQ ID NO: 1910 - protein, 16 aa, synthetic construct
  REGION 1..16: note = GFR-binding peptide
  VARIANT 3: note = Xaa is C or S
PTXAPTKLEPLPVVYY

SEQ ID NO: 1911 - protein, 17 aa, synthetic construct
  REGION 1..17: note = GFR-binding peptide
  VARIANT 3..4: note = Xaa is C or S
SPXXVSQDLEPLPIVYY

SEQ ID NO: 1912 - protein, 16 aa, synthetic construct
  REGION 1..16: note = GFR-binding peptide
  VARIANT 2..3: note = Xaa is C or S
PXXAPTKLEPLTVLYY

SEQ ID NO: 1913 - protein, 19 aa, synthetic construct
  REGION 1..19: note = GFR-binding peptide
  VARIANT 5..6: note = Xaa is C or S
SAAPXXVPQALSPISILFI

SEQ ID NO: 1914 - protein, 14 aa, synthetic construct
  REGION 1..14: note = GFR-binding peptide
  VARIANT 1: note = Xaa is C or S
XVPTRLEPLPIVYY

SEQ ID NO: 1915 - protein, 20 aa, synthetic construct
  REGION 1..20: note = GFR-binding peptide
  VARIANT 6..7: note = Xaa is C or S
KIPKAXXVPTELEPLTMLYY

SEQ ID NO: 1916 - protein, 16 aa, synthetic construct
  REGION 1..16: note = GFR-binding peptide
  VARIANT 2..3: note = Xaa is C or S
PXXVPQALSAISILYL

SEQ ID NO: 1917 - protein, 16 aa, synthetic construct
  REGION 1..16: note = GFR-binding peptide
  VARIANT 2..3: note = Xaa is C or S
PXXAPTQLSAISVLYL

SEQ ID NO: 1918 - protein, 15 aa, synthetic construct
  REGION 1..15: note = GFR-binding peptide
  VARIANT 1..2: note = Xaa is C or S
XXAPTKLEPLPVVYY

SEQ ID NO: 1919 - protein, 13 aa, synthetic construct
  REGION 1..13: note = GFR-binding peptide
VPQDLSPISILFI

SEQ ID NO: 1920 - protein, 15 aa, synthetic construct
  REGION 1..15: note = GFR-binding peptide
  VARIANT 2: note = Xaa is C or S
TXAPTKLSPISVLFI

SEQ ID NO: 1921 - protein, 13 aa, synthetic construct
  REGION 1..13: note = GFR-binding peptide
APTKLEPLPVVYY

SEQ ID NO: 1922 - protein, 13 aa, synthetic construct
  REGION 1..13: note = GFR-binding peptide
VPTELSPISMLFI

SEQ ID NO: 1923 - protein, 10 aa, synthetic construct
  REGION 1..10: note = GFR-binding peptide
RLEPLPIVYY

SEQ ID NO: 1924 - protein, 20 aa, synthetic construct
  REGION 1..20: note = GFR-binding peptide
  VARIANT 6..7: note = Xaa is C or S
SIPKAXXVPTELEPLPMVYY

SEQ ID NO: 1925 - protein, 16 aa, synthetic construct
  REGION 1..16: note = GFR-binding peptide
  VARIANT 2..3: note = Xaa is C or S
TXXVPTRLEPLTILYY

SEQ ID NO: 1926 - protein, 12 aa, synthetic construct
  REGION 1..12: note = GFR-binding peptide
PTRLSAISILYL

SEQ ID NO: 1927 - protein, 14 aa, synthetic construct
  REGION 1..14: note = GFR-binding peptide
  VARIANT 1: note = Xaa is C or S
XVPTRLEPLTILYY

SEQ ID NO: 1928 - protein, 14 aa, synthetic construct
  REGION 1..14: note = GFR-binding peptide
  VARIANT 1: note = Xaa is C or S
XAPTKLEPLTVLYY

SEQ ID NO: 1929 - protein, 16 aa, synthetic construct
  REGION 1..16: note = GFR-binding peptide
  VARIANT 3: note = Xaa is C or S
PTXAPTKLSPISVLFI

SEQ ID NO: 1930 - protein, 17 aa, synthetic construct
  REGION 1..17: note = GFR-binding peptide
  VARIANT 4: note = Xaa is C or S
KPTXAPTKLEPLTVLYY

SEQ ID NO: 1931 - protein, 14 aa, synthetic construct
  REGION 1..14: note = GFR-binding peptide
  VARIANT 1: note = Xaa is C or S
XVSQDLSPISILFI

SEQ ID NO: 1932 - protein, 19 aa, synthetic construct
  REGION 1..19: note = GFR-binding peptide
  VARIANT 6: note = Xaa is C or S
VTKPTXAPTKLEPLTVLYY

SEQ ID NO: 1933 - protein, 9 aa, synthetic construct
  REGION 1..9: note = GFR-binding peptide
LSPISVLFI

SEQ ID NO: 1934 - protein, 15 aa, synthetic construct
  REGION 1..15: note = GFR-binding peptide
  VARIANT 2: note = Xaa is C or S
TXAPTKLEPLPVVYY

SEQ ID NO: 1935 - protein, 16 aa, synthetic construct
  REGION 1..16: note = GFR-binding peptide
  VARIANT 2..3: note = Xaa is C or S
AXXVPTELEPLTMLYY

SEQ ID NO: 1936 - protein, 13 aa, synthetic construct
  REGION 1..13: note = GFR-binding peptide
VSQDLSAISILYL

SEQ ID NO: 1937 - protein, 11 aa, synthetic construct
  REGION 1..11: note = GFR-binding peptide
QALSPISILFI

SEQ ID NO: 1938 - protein, 14 aa, synthetic construct
  REGION 1..14: note = GFR-binding peptide
  VARIANT 1: note = Xaa is C or S
XAPTQLEPLTVLYY

SEQ ID NO: 1939 - protein, 15 aa, synthetic construct
  REGION 1..15: note = GFR-binding peptide
  VARIANT 1..2: note = Xaa is C or S
XXVPQDLEPLPIVYY

SEQ ID NO: 1940 - protein, 13 aa, synthetic construct
  REGION 1..13: note = GFR-binding peptide
VSQDLSPISILFI

SEQ ID NO: 1941 - protein, 17 aa, synthetic construct
  REGION 1..17: note = GFR-binding peptide
  VARIANT 3..4: note = Xaa is C or S
SPXXVPQDLNAISILYF

SEQ ID NO: 1942 - protein, 18 aa, synthetic construct
  REGION 1..18: note = GFR-binding peptide
  VARIANT 4..5: note = Xaa is C or S
ASPXXVPQDLSPISILFI

SEQ ID NO: 1943 - protein, 18 aa, synthetic construct
  REGION 1..18: note = GFR-binding peptide
  VARIANT 4..5: note = Xaa is C or S
ASPXXVPQDLSAISILYL

SEQ ID NO: 1944 - protein, 20 aa, synthetic construct
  REGION 1..20: note = GFR-binding peptide
  VARIANT 7: note = Xaa is C or S
HVTKPTXAPTKLEPLPVVYY

SEQ ID NO: 1945 - protein, 19 aa, synthetic construct
  REGION 1..19: note = GFR-binding peptide
  VARIANT 5..6: note = Xaa is C or S
IPKAXXVPTELEPLTMLYY

SEQ ID NO: 1946 - protein, 15 aa, synthetic construct
  REGION 1..15: note = GFR-binding peptide
  VARIANT 1..2: note = Xaa is C or S
XXVPQALSAISILYL

SEQ ID NO: 1947 - protein, 15 aa, synthetic construct
  REGION 1..15: note = GFR-binding peptide
  VARIANT 1..2: note = Xaa is C or S
XXVPQALSPISILFI

SEQ ID NO: 1948 - protein, 16 aa, synthetic construct
  REGION 1..16: note = GFR-binding peptide
  VARIANT 2..3: note = Xaa is C or S
PXXVPQDLSPISILFI

SEQ ID NO: 1949 - protein, 17 aa, synthetic construct
  REGION 1..17: note = GFR-binding peptide
  VARIANT 3..4: note = Xaa is C or S
KAXXVPTELEPLTMLYY

SEQ ID NO: 1950 - protein, 16 aa, synthetic construct
  REGION 1..16: note = GFR-binding peptide
  VARIANT 2..3: note = Xaa is C or S
PXXAPTKLSPISVLFI

SEQ ID NO: 1951 - protein, 18 aa, synthetic construct
  REGION 1..18: note = GFR-binding peptide
  VARIANT 4..5: note = Xaa is C or S
PKAXXVPTELNAISMLYF

SEQ ID NO: 1952 - protein, 17 aa, synthetic construct
  REGION 1..17: note = GFR-binding peptide
  VARIANT 3..4: note = Xaa is C or S
APXXVPQALEPLTILYY

SEQ ID NO: 1953 - protein, 10 aa, synthetic construct
  REGION 1..10: note = GFR-binding peptide
QLEPLTVLYY

SEQ ID NO: 1954 - protein, 19 aa, synthetic construct
  REGION 1..19: note = GFR-binding peptide
  VARIANT 5..6: note = Xaa is C or S
SASPXXVPQDLEPLPIVYY

SEQ ID NO: 1955 - protein, 11 aa, synthetic construct
  REGION 1..11: note = GFR-binding peptide
QALEPLTILYY

SEQ ID NO: 1956 - protein, 14 aa, synthetic construct
  REGION 1..14: note = GFR-binding peptide
  VARIANT 1: note = Xaa is C or S
XAPTQLSPISVLFI

SEQ ID NO: 1957 - protein, 19 aa, synthetic construct
  REGION 1..19: note = GFR-binding peptide
  VARIANT 5..6: note = Xaa is C or S
VPKPXXAPTQLSPISVLFI

SEQ ID NO: 1958 - protein, 17 aa, synthetic construct
  REGION 1..17: note = GFR-binding peptide
  VARIANT 3..4: note = Xaa is C or S
KAXXVPTELNAISMLYF

SEQ ID NO: 1959 - protein, 12 aa, synthetic construct
  REGION 1..12: note = GFR-binding peptide
PTRLNAISILYF

SEQ ID NO: 1960 - protein, 20 aa, synthetic construct
  REGION 1..20: note = GFR-binding peptide
  VARIANT 6..7: note = Xaa is C or S
TVPKPXXAPTQLSPISVLFI

SEQ ID NO: 1961 - protein, 17 aa, synthetic construct
  REGION 1..17: note = GFR-binding peptide
  VARIANT 3..4: note = Xaa is C or S
APXXVPQALNAISILYF

SEQ ID NO: 1962 - protein, 9 aa, synthetic construct
  REGION 1..9: note = GFR-binding peptide
LEPLPMVYY

SEQ ID NO: 1963 - protein, 14 aa, synthetic construct
  REGION 1..14: note = GFR-binding peptide
  VARIANT 1: note = Xaa is C or S
XVSQDLEPLPIVYY

SEQ ID NO: 1964 - protein, 20 aa, synthetic construct
  REGION 1..20: note = GFR-binding peptide
  VARIANT 6..7: note = Xaa is C or S
TVPKPXXAPTQLSAISVLYL

SEQ ID NO: 1965 - protein, 18 aa, synthetic construct
  REGION 1..18: note = GFR-binding peptide
  VARIANT 4..5: note = Xaa is C or S
AAPXXVPQALSAISILYL

SEQ ID NO: 1966 - protein, 13 aa, synthetic construct
  REGION 1..13: note = GFR-binding peptide
VPTELEPLPMVYY

SEQ ID NO: 1967 - protein, 11 aa, synthetic construct
  REGION 1..11: note = GFR-binding peptide
TQLSPISVLFI

SEQ ID NO: 1968 - protein, 18 aa, synthetic construct
  REGION 1..18: note = GFR-binding peptide
  VARIANT 4..5: note = Xaa is C or S
AAPXXVPQALSPISILFI

SEQ ID NO: 1969 - protein, 19 aa, synthetic construct
  REGION 1..19: note = GFR-binding peptide
  VARIANT 5..6: note = Xaa is C or S
VPKPXXAPTQLSAISVLYL

SEQ ID NO: 1970 - protein, 15 aa, synthetic construct
  REGION 1..15: note = GFR-binding peptide
  VARIANT 1..2: note = Xaa is C or S
XXVPTELEPLPMVYY

SEQ ID NO: 1971 - protein, 9 aa, synthetic construct
  REGION 1..9: note = GFR-binding peptide
LEPLTVLYY

SEQ ID NO: 1972 - protein, 11 aa, synthetic construct
  REGION 1..11: note = GFR-binding peptide
TELNAISMLYF

SEQ ID NO: 1973 - protein, 13 aa, synthetic construct
  REGION 1..13: note = GFR-binding peptide
APTQLSPISVLFI

SEQ ID NO: 1974 - protein, 14 aa, synthetic construct
  REGION 1..14: note = GFR-binding peptide
  VARIANT 1: note = Xaa is C or S
XVPQALSAISILYL

SEQ ID NO: 1975 - protein, 20 aa, synthetic construct
  REGION 1..20: note = GFR-binding peptide
  VARIANT 7: note = Xaa is C or S
HVTKPTXAPTKLSAISVLYL

SEQ ID NO: 1976 - protein, 13 aa, synthetic construct
  REGION 1..13: note = GFR-binding peptide
APTKLSAISVLYL

SEQ ID NO: 1977 - protein, 13 aa, synthetic construct
  REGION 1..13: note = GFR-binding peptide
VSQDLEPLPIVYY

SEQ ID NO: 1978 - protein, 19 aa, synthetic construct
  REGION 1..19: note = GFR-binding peptide
  VARIANT 5..6: note = Xaa is C or S
VPKPXXAPTQLEPLTVLYY

SEQ ID NO: 1979 - protein, 14 aa, synthetic construct
  REGION 1..14: note = GFR-binding peptide
  VARIANT 1: note = Xaa is C or S
XVPTELEPLTMLYY

SEQ ID NO: 1980 - protein, 10 aa, synthetic construct
  REGION 1..10: note = GFR-binding peptide
ALSPISILFI

SEQ ID NO: 1981 - protein, 15 aa, synthetic construct
  REGION 1..15: note = GFR-binding peptide
  VARIANT 1..2: note = Xaa is C or S
XXVPTRLEPLPIVYY

SEQ ID NO: 1982 - protein, 20 aa, synthetic construct
  REGION 1..20: note = GFR-binding peptide
  VARIANT 6..7: note = Xaa is C or S
YVPKPXXAPTKLEPLTVLYY

SEQ ID NO: 1983 - protein, 14 aa, synthetic construct
  REGION 1..14: note = GFR-binding peptide
  VARIANT 1: note = Xaa is C or S
XVPTELEPLPMVYY

SEQ ID NO: 1984 - protein, 17 aa, synthetic construct
  REGION 1..17: note = GFR-binding peptide
  VARIANT 3..4: note = Xaa is C or S
SPXXVPQDLEPLPIVYY

SEQ ID NO: 1985 - protein, 19 aa, synthetic construct
  REGION 1..19: note = GFR-binding peptide
  VARIANT 5..6: note = Xaa is C or S
SASPXXVPQDLSAISILYL

SEQ ID NO: 1986 - protein, 13 aa, synthetic construct
  REGION 1..13: note = GFR-binding peptide
VPQALSPISILFI

SEQ ID NO: 1987 - protein, 17 aa, synthetic construct
  REGION 1..17: note = GFR-binding peptide
  VARIANT 4: note = Xaa is C or S
KPTXAPTKLSAISVLYL

SEQ ID NO: 1988 - protein, 16 aa, synthetic construct
  REGION 1..16: note = GFR-binding peptide
  VARIANT 2..3: note = Xaa is C or S
PXXVSQDLEPLPIVYY

SEQ ID NO: 1989 - protein, 15 aa, synthetic construct
  REGION 1..15: note = GFR-binding peptide
  VARIANT 1..2: note = Xaa is C or S
XXVPQDLNAISILYF

SEQ ID NO: 1990 - protein, 20 aa, synthetic construct
  REGION 1..20: note = GFR-binding peptide
  VARIANT 6..7: note = Xaa is C or S
SIPKAXXVPTELEPLTMLYY

SEQ ID NO: 1991 - protein, 12 aa, synthetic construct
  REGION 1..12: note = GFR-binding peptide
SQDLSPISILFI

SEQ ID NO: 1992 - protein, 16 aa, synthetic construct
  REGION 1..16: note = GFR-binding peptide
  VARIANT 2..3: note = Xaa is C or S
TXXVPTRLNAISILYF

SEQ ID NO: 1993 - protein, 9 aa, synthetic construct
  REGION 1..9: note = GFR-binding peptide
LEPLTMLYY

SEQ ID NO: 1994 - protein, 11 aa, synthetic construct
  REGION 1..11: note = GFR-binding peptide
TKLSAISVLYL

SEQ ID NO: 1995 - protein, 20 aa, synthetic construct
  REGION 1..20: note = GFR-binding peptide
  VARIANT 6..7: note = Xaa is C or S
KIPKAXXVPTELNAISMLYF

SEQ ID NO: 1996 - protein, 10 aa, synthetic construct
  REGION 1..10: note = GFR-binding peptide
KLEPLTVLYY

SEQ ID NO: 1997 - protein, 15 aa, synthetic construct
  REGION 1..15: note = GFR-binding peptide
  VARIANT 1..2: note = Xaa is C or S
XXVSQDLEPLPIVYY

SEQ ID NO: 1998 - protein, 12 aa, synthetic construct
  REGION 1..12: note = GFR-binding peptide
PTELEPLTMLYY

SEQ ID NO: 1999 - protein, 20 aa, synthetic construct
  REGION 1..20: note = GFR-binding peptide
  VARIANT 6..7: note = Xaa is C or S
TVPKPXXAPTQLEPLTVLYY

SEQ ID NO: 2000 - protein, 14 aa, synthetic construct
  REGION 1..14: note = GFR-binding peptide
  VARIANT 1: note = Xaa is C or S
XAPTKLSPISVLFI

SEQ ID NO: 2001 - protein, 10 aa, synthetic construct
  REGION 1..10: note = GFR-binding peptide
RLNAISILYF

SEQ ID NO: 2002 - protein, 17 aa, synthetic construct
  REGION 1..17: note = GFR-binding peptide
  VARIANT 3..4: note = Xaa is C or S
KPXXAPTKLSAISVLYL

SEQ ID NO: 2003 - protein, 12 aa, synthetic construct
  REGION 1..12: note = GFR-binding peptide
SQDLNAISILYF

SEQ ID NO: 2004 - protein, 12 aa, synthetic construct
  REGION 1..12: note = GFR-binding peptide
PTKLEPLPVVYY

SEQ ID NO: 2005 - protein, 10 aa, synthetic construct
  REGION 1..10: note = GFR-binding peptide
ALNAISILYF

SEQ ID NO: 2006 - protein, 15 aa, synthetic construct
  REGION 1..15: note = GFR-binding peptide
  VARIANT 1..2: note = Xaa is C or S
XXVPTRLEPLTILYY

SEQ ID NO: 2007 - protein, 16 aa, synthetic construct
  REGION 1..16: note = GFR-binding peptide
  VARIANT 2..3: note = Xaa is C or S
PXXAPTQLSPISVLFI

SEQ ID NO: 2008 - protein, 10 aa, synthetic construct
  REGION 1..10: note = GFR-binding peptide
DLSPISILFI

SEQ ID NO: 2009 - protein, 19 aa, synthetic construct
  REGION 1..19: note = GFR-binding peptide
  VARIANT 5..6: note = Xaa is C or S
VPKPXXAPTKLSPISVLFI

SEQ ID NO: 2010 - protein, 15 aa, synthetic construct
  REGION 1..15: note = GFR-binding peptide
  VARIANT 1..2: note = Xaa is C or S
XXVPQDLSPISILFI

SEQ ID NO: 2011 - protein, 15 aa, synthetic construct
  REGION 1..15: note = GFR-binding peptide
  VARIANT 1..2: note = Xaa is C or S
XXVPQALNAISILYF

SEQ ID NO: 2012 - protein, 13 aa, synthetic construct
  REGION 1..13: note = GFR-binding peptide
VPQDLSAISILYL

SEQ ID NO: 2013 - protein, 13 aa, synthetic construct
  REGION 1..13: note = GFR-binding peptide
VPQALNAISILYF

SEQ ID NO: 2014 - protein, 19 aa, synthetic construct
  REGION 1..19: note = GFR-binding peptide
  VARIANT 5..6: note = Xaa is C or S
SAAPXXVPQALEPLTILYY

SEQ ID NO: 2015 - protein, 14 aa, synthetic construct
  REGION 1..14: note = GFR-binding peptide
  VARIANT 1: note = Xaa is C or S
XVPQDLSPISILFI

SEQ ID NO: 2016 - protein, 14 aa, synthetic construct
  REGION 1..14: note = GFR-binding peptide
  VARIANT 1: note = Xaa is C or S
XVPQDLSAISILYL

SEQ ID NO: 2017 - protein, 10 aa, synthetic construct
  REGION 1..10: note = GFR-binding peptide
KLEPLPVVYY

SEQ ID NO: 2018 - protein, 19 aa, synthetic construct
  REGION 1..19: note = GFR-binding peptide
  VARIANT 5..6: note = Xaa is C or S
TPPTXXVPTRLEPLPIVYY

SEQ ID NO: 2019 - protein, 18 aa, synthetic construct
  REGION 1..18: note = GFR-binding peptide
  VARIANT 4..5: note = Xaa is C or S
PKPXXAPTKLSAISVLYL

SEQ ID NO: 2020 - protein, 14 aa, synthetic construct
  REGION 1..14: note = GFR-binding peptide
  VARIANT 1: note = Xaa is C or S
XVSQDLNAISILYF

SEQ ID NO: 2021 - protein, 17 aa, synthetic construct
  REGION 1..17: note = GFR-binding peptide
  VARIANT 3..4: note = Xaa is C or S
PTXXVPTRLEPLTILYY

SEQ ID NO: 2022 - protein, 10 aa, synthetic construct
  REGION 1..10: note = GFR-binding peptide
QLEPLPVVYY

SEQ ID NO: 2023 - protein, 14 aa, synthetic construct
  REGION 1..14: note = GFR-binding peptide
  VARIANT 1: note = Xaa is C or S
XVPQDLNAISILYF

SEQ ID NO: 2024 - protein, 13 aa, synthetic construct
  REGION 1..13: note = GFR-binding peptide
VPQDLNAISILYF

SEQ ID NO: 2025 - protein, 15 aa, synthetic construct
  REGION 1..15: note = GFR-binding peptide
  VARIANT 1..2: note = Xaa is C or S
XXAPTKLSPISVLFI

SEQ ID NO: 2026 - protein, 12 aa, synthetic construct
  REGION 1..12: note = GFR-binding peptide
PTELEPLPMVYY

SEQ ID NO: 2027 - protein, 18 aa, synthetic construct
  REGION 1..18: note = GFR-binding peptide
  VARIANT 4..5: note = Xaa is C or S
PPTXXVPTRLEPLPIVYY

SEQ ID NO: 2028 - protein, 15 aa, synthetic construct
  REGION 1..15: note = GFR-binding peptide
  VARIANT 1..2: note = Xaa is C or S
XXAPTKLSAISVLYL

SEQ ID NO: 2029 - protein, 18 aa, synthetic construct
  REGION 1..18: note = GFR-binding peptide
  VARIANT 4..5: note = Xaa is C or S
PKPXXAPTKLSPISVLFI

SEQ ID NO: 2030 - protein, 9 aa, synthetic construct
  REGION 1..9: note = GFR-binding peptide
LSAISILYL

SEQ ID NO: 2031 - protein, 10 aa, synthetic construct
  REGION 1..10: note = GFR-binding peptide
DLNAISILYF

SEQ ID NO: 2032 - protein, 18 aa, synthetic construct
  REGION 1..18: note = GFR-binding peptide
  VARIANT 4..5: note = Xaa is C or S
PKPXXAPTQLSAISVLYL

SEQ ID NO: 2033 - protein, 18 aa, synthetic construct
  REGION 1..18: note = GFR-binding peptide
  VARIANT 4..5: note = Xaa is C or S
PKPXXAPTQLSPISVLFI

SEQ ID NO: 2034 - protein, 15 aa, synthetic construct
  REGION 1..15: note = GFR-binding peptide
  VARIANT 1..2: note = Xaa is C or S
XXAPTQLSAISVLYL

SEQ ID NO: 2035 - protein, 15 aa, synthetic construct
  REGION 1..15: note = GFR-binding peptide
  VARIANT 1..2: note = Xaa is C or S
XXAPTQLSPISVLFI

SEQ ID NO: 2036 - protein, 20 aa, synthetic construct
  REGION 1..20: note = GFR-binding peptide
  VARIANT 6..7: note = Xaa is C or S
ASAAPXXVPQALNAISILYF

SEQ ID NO: 2037 - protein, 19 aa, synthetic construct
  REGION 1..19: note = GFR-binding peptide
  VARIANT 6: note = Xaa is C or S
VTKPTXAPTKLSPISVLFI

SEQ ID NO: 2038 - protein, 19 aa, synthetic construct
  REGION 1..19: note = GFR-binding peptide
  VARIANT 6: note = Xaa is C or S
VTKPTXAPTKLSAISVLYL

SEQ ID NO: 2039 - protein, 20 aa, synthetic construct
  REGION 1..20: note = GFR-binding peptide
  VARIANT 6..7: note = Xaa is C or S
ASAAPXXVPQALSAISILYL

SEQ ID NO: 2040 - protein, 18 aa, synthetic construct
  REGION 1..18: note = GFR-binding peptide
  VARIANT 4..5: note = Xaa is C or S
ASPXXVSQDLNAISILYF

SEQ ID NO: 2041 - protein, 16 aa, synthetic construct
  REGION 1..16: note = GFR-binding peptide
  VARIANT 2..3: note = Xaa is C or S
TXXVPTRLSAISILYL

SEQ ID NO: 2042 - protein, 12 aa, synthetic construct
  REGION 1..12: note = GFR-binding peptide
PQALSAISILYL

SEQ ID NO: 2043 - protein, 12 aa, synthetic construct
  REGION 1..12: note = GFR-binding peptide
PQALSPISILFI

SEQ ID NO: 2044 - protein, 18 aa, synthetic construct
  REGION 1..18: note = GFR-binding peptide
  VARIANT 5: note = Xaa is C or S
TKPTXAPTKLSPISVLFI

SEQ ID NO: 2045 - protein, 19 aa, synthetic construct
  REGION 1..19: note = GFR-binding peptide
  VARIANT 5..6: note = Xaa is C or S
IPKAXXVPTELEPLPMVYY

SEQ ID NO: 2046 - protein, 12 aa, synthetic construct
  REGION 1..12: note = GFR-binding peptide
PTKLEPLTVLYY

SEQ ID NO: 2047 - protein, 12 aa, synthetic construct
  REGION 1..12: note = GFR-binding peptide
PQALNAISILYF

SEQ ID NO: 2048 - protein, 13 aa, synthetic construct
  REGION 1..13: note = GFR-binding peptide
VPTRLEPLPIVYY

SEQ ID NO: 2049 - protein, 12 aa, synthetic construct
  REGION 1..12: note = GFR-binding peptide
PQDLSAISILYL

SEQ ID NO: 2050 - protein, 12 aa, synthetic construct
  REGION 1..12: note = GFR-binding peptide
PQDLSPISILFI

SEQ ID NO: 2051 - protein, 20 aa, synthetic construct
  REGION 1..20: note = GFR-binding peptide
  VARIANT 6..7: note = Xaa is C or S
KIPKAXXVPTELSPISMLFI

SEQ ID NO: 2052 - protein, 15 aa, synthetic construct
  REGION 1..15: note = GFR-binding peptide
  VARIANT 2: note = Xaa is C or S
TXAPTKLEPLTVLYY

SEQ ID NO: 2053 - protein, 10 aa, synthetic construct
  REGION 1..10: note = GFR-binding peptide
ELEPLPMVYY

SEQ ID NO: 2054 - protein, 19 aa, synthetic construct
  REGION 1..19: note = GFR-binding peptide
  VARIANT 5..6: note = Xaa is C or S
SASPXXVSQDLEPLPIVYY

SEQ ID NO: 2055 - protein, 18 aa, synthetic construct
  REGION 1..18: note = GFR-binding peptide
  VARIANT 5: note = Xaa is C or S
TKPTXAPTKLSAISVLYL

SEQ ID NO: 2056 - protein, 11 aa, synthetic construct
  REGION 1..11: note = GFR-binding peptide
TRLEPLTILYY

SEQ ID NO: 2057 - protein, 18 aa, synthetic construct
  REGION 1..18: note = GFR-binding peptide
  VARIANT 4..5: note = Xaa is C or S
ASPXXVSQDLSPISILFI

SEQ ID NO: 2058 - protein, 17 aa, synthetic construct
  REGION 1..17: note = GFR-binding peptide
  VARIANT 3..4: note = Xaa is C or S
KPXXAPTQLSPISVLFI

SEQ ID NO: 2059 - protein, 20 aa, synthetic construct
  REGION 1..20: note = GFR-binding peptide
  VARIANT 6..7: note = Xaa is C or S
YVPKPXXAPTKLEPLPVVYY

SEQ ID NO: 2060 - protein, 18 aa, synthetic construct
  REGION 1..18: note = GFR-binding peptide
  VARIANT 4..5: note = Xaa is C or S
ASPXXVSQDLSAISILYL

SEQ ID NO: 2061 - protein, 17 aa, synthetic construct
  REGION 1..17: note = GFR-binding peptide
  VARIANT 3..4: note = Xaa is C or S
KPXXAPTQLSAISVLYL

SEQ ID NO: 2062 - protein, 9 aa, synthetic construct
  REGION 1..9: note = GFR-binding peptide
LNAISILYF

SEQ ID NO: 2063 - protein, 11 aa, synthetic construct
  REGION 1..11: note = GFR-binding peptide
TELSPISMLFI

SEQ ID NO: 2064 - protein, 14 aa, synthetic construct
  REGION 1..14: note = GFR-binding peptide
  VARIANT 1: note = Xaa is C or S
XVPQALNAISILYF

SEQ ID NO: 2065 - protein, 12 aa, synthetic construct
  REGION 1..12: note = GFR-binding peptide
PTQLEPLPVVYY

SEQ ID NO: 2066 - protein, 10 aa, synthetic construct
  REGION 1..10: note = GFR-binding peptide
QLSAISVLYL

SEQ ID NO: 2067 - protein, 18 aa, synthetic construct
  REGION 1..18: note = GFR-binding peptide
  VARIANT 4..5: note = Xaa is C or S
PKPXXAPTKLEPLTVLYY

SEQ ID NO: 2068 - protein, 18 aa, synthetic construct
  REGION 1..18: note = GFR-binding peptide
  VARIANT 4..5: note = Xaa is C or S
PKAXXVPTELEPLPMVYY

SEQ ID NO: 2069 - protein, 19 aa, synthetic construct
  REGION 1..19: note = GFR-binding peptide
  VARIANT 5..6: note = Xaa is C or S
SAAPXXVPQALNAISILYF

SEQ ID NO: 2070 - protein, 18 aa, synthetic construct
  REGION 1..18: note = GFR-binding peptide
  VARIANT 4..5: note = Xaa is C or S
ASPXXVSQDLEPLPIVYY

SEQ ID NO: 2071 - protein, 10 aa, synthetic construct
  REGION 1..10: note = GFR-binding peptide
KLSPISVLFI

SEQ ID NO: 2072 - protein, 12 aa, synthetic construct
  REGION 1..12: note = GFR-binding peptide
PTELNAISMLYF

SEQ ID NO: 2073 - protein, 10 aa, synthetic construct
  REGION 1..10: note = GFR-binding peptide
RLSAISILYL

SEQ ID NO: 2074 - protein, 10 aa, synthetic construct
  REGION 1..10: note = GFR-binding peptide
ELSPISMLFI

SEQ ID NO: 2075 - protein, 13 aa, synthetic construct
  REGION 1..13: note = GFR-binding peptide
VPQALEPLTILYY

SEQ ID NO: 2076 - protein, 17 aa, synthetic construct
  REGION 1..17: note = GFR-binding peptide
  VARIANT 3..4: note = Xaa is C or S
PTXXVPTRLEPLPIVYY

SEQ ID NO: 2077 - protein, 13 aa, synthetic construct
  REGION 1..13: note = GFR-binding peptide
APTQLEPLTVLYY

SEQ ID NO: 2078 - protein, 18 aa, synthetic construct
  REGION 1..18: note = GFR-binding peptide
  VARIANT 4..5: note = Xaa is C or S
PPTXXVPTRLEPLTILYY

SEQ ID NO: 2079 - protein, 12 aa, synthetic construct
  REGION 1..12: note = GFR-binding peptide
PQDLNAISILYF

SEQ ID NO: 2080 - protein, 12 aa, synthetic construct
  REGION 1..12: note = GFR-binding peptide
PTQLEPLTVLYY

SEQ ID NO: 2081 - protein, 18 aa, synthetic construct
  REGION 1..18: note = GFR-binding peptide
  VARIANT 4..5: note = Xaa is C or S
PKPXXAPTKLEPLPVVYY

SEQ ID NO: 2082 - protein, 11 aa, synthetic construct
  REGION 1..11: note = GFR-binding peptide
TRLSAISILYL

SEQ ID NO: 2083 - protein, 14 aa, synthetic construct
  REGION 1..14: note = GFR-binding peptide
  VARIANT 1: note = Xaa is C or S
XAPTKLSAISVLYL

SEQ ID NO: 2084 - protein, 19 aa, synthetic construct
  REGION 1..19: note = GFR-binding peptide
  VARIANT 5..6: note = Xaa is C or S
VPKPXXAPTKLSAISVLYL

SEQ ID NO: 2085 - protein, 19 aa, synthetic construct
  REGION 1..19: note = GFR-binding peptide
  VARIANT 5..6: note = Xaa is C or S
IPKAXXVPTELNAISMLYF

SEQ ID NO: 2086 - protein, 17 aa, synthetic construct
  REGION 1..17: note = GFR-binding peptide
  VARIANT 3..4: note = Xaa is C or S
SPXXVPQDLSAISILYL

SEQ ID NO: 2087 - protein, 11 aa, synthetic construct
  REGION 1..11: note = GFR-binding peptide
TKLSPISVLFI

SEQ ID NO: 2088 - protein, 19 aa, synthetic construct
  REGION 1..19: note = GFR-binding peptide
  VARIANT 5..6: note = Xaa is C or S
SASPXXVPQDLNAISILYF

SEQ ID NO: 2089 - protein, 20 aa, synthetic construct
  REGION 1..20: note = GFR-binding peptide
  VARIANT 6..7: note = Xaa is C or S
SIPKAXXVPTELNAISMLYF

SEQ ID NO: 2090 - protein, 13 aa, synthetic construct
  REGION 1..13: note = GFR-binding peptide
VPTRLEPLTILYY

SEQ ID NO: 2091 - protein, 11 aa, synthetic construct
  REGION 1..11: note = GFR-binding peptide
TELEPLPMVYY

SEQ ID NO: 2092 - protein, 16 aa, synthetic construct
  REGION 1..16: note = GFR-binding peptide
  VARIANT 2..3: note = Xaa is C or S
AXXVPTELNAISMLYF

SEQ ID NO: 2093 - protein, 17 aa, synthetic construct
  REGION 1..17: note = GFR-binding peptide
  VARIANT 3..4: note = Xaa is C or S
KPXXAPTKLSPISVLFI

SEQ ID NO: 2094 - protein, 15 aa, synthetic construct
  REGION 1..15: note = GFR-binding peptide
  VARIANT 1..2: note = Xaa is C or S
XXVPQDLSAISILYL

SEQ ID NO: 2095 - protein, 12 aa, synthetic construct
  REGION 1..12: note = GFR-binding peptide
PTRLEPLPIVYY

SEQ ID NO: 2096 - protein, 10 aa, synthetic construct
  REGION 1..10: note = GFR-binding peptide
DLSAISILYL

SEQ ID NO: 2097 - protein, 9 aa, synthetic construct
  REGION 1..9: note = GFR-binding peptide
LNAISMLYF

SEQ ID NO: 2098 - protein, 16 aa, synthetic construct
  REGION 1..16: note = GFR-binding peptide
  VARIANT 2..3: note = Xaa is C or S
PXXVPQALEPLTILYY

SEQ ID NO: 2099 - protein, 17 aa, synthetic construct
  REGION 1..17: note = GFR-binding peptide
  VARIANT 3..4: note = Xaa is C or S
APXXVPQALSAISILYL

SEQ ID NO: 2100 - protein, 16 aa, synthetic construct
  REGION 1..16: note = GFR-binding peptide
  VARIANT 3: note = Xaa is C or S
PTXAPTKLSAISVLYL

SEQ ID NO: 2101 - protein, 11 aa, synthetic construct
  REGION 1..11: note = GFR-binding peptide
QDLEPLPIVYY

SEQ ID NO: 2102 - protein, 14 aa, synthetic construct
  REGION 1..14: note = GFR-binding peptide
  VARIANT 1: note = Xaa is C or S
XVSQDLSAISILYL

SEQ ID NO: 2103 - protein, 9 aa, synthetic construct
  REGION 1..9: note = GFR-binding peptide
LSAISVLYL

SEQ ID NO: 2104 - protein, 18 aa, synthetic construct
  REGION 1..18: note = GFR-binding peptide
  VARIANT 4..5: note = Xaa is C or S
PKAXXVPTELEPLTMLYY

SEQ ID NO: 2105 - protein, 11 aa, synthetic construct
  REGION 1..11: note = GFR-binding peptide
QALSAISILYL

SEQ ID NO: 2106 - protein, 17 aa, synthetic construct
  REGION 1..17: note = GFR-binding peptide
  VARIANT 3..4: note = Xaa is C or S
KAXXVPTELSPISMLFI

SEQ ID NO: 2107 - protein, 10 aa, synthetic construct
  REGION 1..10: note = GFR-binding peptide
ELEPLTMLYY

SEQ ID NO: 2108 - protein, 17 aa, synthetic construct
  REGION 1..17: note = GFR-binding peptide
  VARIANT 3..4: note = Xaa is C or S
APXXVPQALSPISILFI

SEQ ID NO: 2109 - protein, 16 aa, synthetic construct
  REGION 1..16: note = GFR-binding peptide
  VARIANT 2..3: note = Xaa is C or S
PXXVPQDLSAISILYL

SEQ ID NO: 2110 - protein, 20 aa, synthetic construct
  REGION 1..20: note = GFR-binding peptide
  VARIANT 6..7: note = Xaa is C or S
ASASPXXVSQDLSAISILYL

SEQ ID NO: 2111 - protein, 18 aa, synthetic construct
  REGION 1..18: note = GFR-binding peptide
  VARIANT 4..5: note = Xaa is C or S
AAPXXVPQALNAISILYF

SEQ ID NO: 2112 - protein, 17 aa, synthetic construct
  REGION 1..17: note = GFR-binding peptide
  VARIANT 3..4: note = Xaa is C or S
KPXXAPTKLEPLPVVYY

SEQ ID NO: 2113 - protein, 15 aa, synthetic construct
  REGION 1..15: note = GFR-binding peptide
  VARIANT 1..2: note = Xaa is C or S
XXVSQDLNAISILYF

SEQ ID NO: 2114 - protein, 12 aa, synthetic construct
  REGION 1..12: note = GFR-binding peptide
SQDLEPLPIVYY

SEQ ID NO: 2115 - protein, 14 aa, synthetic construct
  REGION 1..14: note = GFR-binding peptide
  VARIANT 1: note = Xaa is C or S
XVPTRLNAISILYF

SEQ ID NO: 2116 - protein, 14 aa, synthetic construct
  REGION 1..14: note = GFR-binding peptide
  VARIANT 1: note = Xaa is C or S
XVPTRLSAISILYL

SEQ ID NO: 2117 - protein, 12 aa, synthetic construct
  REGION 1..12: note = GFR-binding peptide
PTRLEPLTILYY

SEQ ID NO: 2118 - protein, 11 aa, synthetic construct
  REGION 1..11: note = GFR-binding peptide
TELEPLTMLYY

SEQ ID NO: 2119 - protein, 16 aa, synthetic construct
  REGION 1..16: note = GFR-binding peptide
  VARIANT 2..3: note = Xaa is C or S
PXXAPTKLSAISVLYL

SEQ ID NO: 2120 - protein, 19 aa, synthetic construct
  REGION 1..19: note = GFR-binding peptide
  VARIANT 5..6: note = Xaa is C or S
TPPTXXVPTRLEPLTILYY

SEQ ID NO: 2121 - protein, 11 aa, synthetic construct
  REGION 1..11: note = GFR-binding peptide
QALNAISILYF

SEQ ID NO: 2122 - protein, 20 aa, synthetic construct
  REGION 1..20: note = GFR-binding peptide
  VARIANT 6..7: note = Xaa is C or S
ASASPXXVSQDLNAISILYF

SEQ ID NO: 2123 - protein, 11 aa, synthetic construct
  REGION 1..11: note = GFR-binding peptide
TQLSAISVLYL

SEQ ID NO: 2124 - protein, 13 aa, synthetic construct
  REGION 1..13: note = GFR-binding peptide
VSQDLNAISILYF

SEQ ID NO: 2125 - protein, 14 aa, synthetic construct
  REGION 1..14: note = GFR-binding peptide
  VARIANT 1: note = Xaa is C or S
XAPTQLSAISVLYL

SEQ ID NO: 2126 - protein, 11 aa, synthetic construct
  REGION 1..11: note = GFR-binding peptide
QDLSAISILYL

SEQ ID NO: 2127 - protein, 11 aa, synthetic construct
  REGION 1..11: note = GFR-binding peptide
QDLSPISILFI

SEQ ID NO: 2128 - protein, 18 aa, synthetic construct
  REGION 1..18: note = GFR-binding peptide
  VARIANT 4..5: note = Xaa is C or S
PKAXXVPTELSPISMLFI

SEQ ID NO: 2129 - protein, 18 aa, synthetic construct
  REGION 1..18: note = GFR-binding peptide
  VARIANT 4..5: note = Xaa is C or S
ASPXXVPQDLNAISILYF

SEQ ID NO: 2130 - protein, 16 aa, synthetic construct
  REGION 1..16: note = GFR-binding peptide
  VARIANT 2..3: note = Xaa is C or S
PXXVPQDLNAISILYF

SEQ ID NO: 2131 - protein, 17 aa, synthetic construct
  REGION 1..17: note = GFR-binding peptide
  VARIANT 3..4: note = Xaa is C or S
KAXXVPTELEPLPMVYY

SEQ ID NO: 2132 - protein, 18 aa, synthetic construct
  REGION 1..18: note = GFR-binding peptide
  VARIANT 4..5: note = Xaa is C or S
PPTXXVPTRLNAISILYF

SEQ ID NO: 2133 - protein, 11 aa, synthetic construct
  REGION 1..11: note = GFR-binding peptide
TKLEPLTVLYY

SEQ ID NO: 2134 - protein, 15 aa, synthetic construct
  REGION 1..15: note = GFR-binding peptide
  VARIANT 1..2: note = Xaa is C or S
XXAPTQLEPLPVVYY

SEQ ID NO: 2135 - protein, 17 aa, synthetic construct
  REGION 1..17: note = GFR-binding peptide
  VARIANT 3..4: note = Xaa is C or S
KPXXAPTKLEPLTVLYY

SEQ ID NO: 2136 - protein, 20 aa, synthetic construct
  REGION 1..20: note = GFR-binding peptide
  VARIANT 6..7: note = Xaa is C or S
ASAAPXXVPQALEPLTILYY

SEQ ID NO: 2137 - protein, 19 aa, synthetic construct
  REGION 1..19: note = GFR-binding peptide
  VARIANT 5..6: note = Xaa is C or S
SASPXXVSQDLSPISILFI

SEQ ID NO: 2138 - protein, 10 aa, synthetic construct
  REGION 1..10: note = GFR-binding peptide
QLSPISVLFI

SEQ ID NO: 2139 - protein, 14 aa, synthetic construct
  REGION 1..14: note = GFR-binding peptide
  VARIANT 1: note = Xaa is C or S
XVPQDLEPLPIVYY

SEQ ID NO: 2140 - protein, 19 aa, synthetic construct
  REGION 1..19: note = GFR-binding peptide
  VARIANT 5..6: note = Xaa is C or S
SASPXXVSQDLNAISILYF

SEQ ID NO: 2141 - protein, 18 aa, synthetic construct
  REGION 1..18: note = GFR-binding peptide
  VARIANT 4..5: note = Xaa is C or S
PKPXXAPTQLEPLTVLYY

SEQ ID NO: 2142 - protein, 15 aa, synthetic construct
  REGION 1..15: note = GFR-binding peptide
  VARIANT 1..2: note = Xaa is C or S
XXVPTELSPISMLFI

SEQ ID NO: 2143 - protein, 20 aa, synthetic construct
  REGION 1..20: note = GFR-binding peptide
  VARIANT 6..7: note = Xaa is C or S
TVPKPXXAPTQLEPLPVVYY

SEQ ID NO: 2144 - protein, 16 aa, synthetic construct
  REGION 1..16: note = GFR-binding peptide
  VARIANT 2..3: note = Xaa is C or S
PXXAPTQLEPLPVVYY

SEQ ID NO: 2145 - protein, 20 aa, synthetic construct
  REGION 1..20: note = GFR-binding peptide
  VARIANT 6..7: note = Xaa is C or S
YVPKPXXAPTKLSAISVLYL

SEQ ID NO: 2146 - protein, 16 aa, synthetic construct
  REGION 1..16: note = GFR-binding peptide
  VARIANT 2..3: note = Xaa is C or S
PXXVPQALNAISILYF

SEQ ID NO: 2147 - protein, 10 aa, synthetic construct
  REGION 1..10: note = GFR-binding peptide
KLSAISVLYL

SEQ ID NO: 2148 - protein, 17 aa, synthetic construct
  REGION 1..17: note = GFR-binding peptide
  VARIANT 3..4: note = Xaa is C or S
PTXXVPTRLSAISILYL

SEQ ID NO: 2149 - protein, 19 aa, synthetic construct
  REGION 1..19: note = GFR-binding peptide
  VARIANT 5..6: note = Xaa is C or S
TPPTXXVPTRLNAISILYF

SEQ ID NO: 2150 - protein, 15 aa, synthetic construct
  REGION 1..15: note = GFR-binding peptide
  VARIANT 1..2: note = Xaa is C or S
XXVSQDLSAISILYL

SEQ ID NO: 2151 - protein, 18 aa, synthetic construct
  REGION 1..18: note = GFR-binding peptide
  VARIANT 4..5: note = Xaa is C or S
AAPXXVPQALEPLTILYY

SEQ ID NO: 2152 - protein, 11 aa, synthetic construct
  REGION 1..11: note = GFR-binding peptide
TKLEPLPVVYY

SEQ ID NO: 2153 - protein, 19 aa, synthetic construct
  REGION 1..19: note = GFR-binding peptide
  VARIANT 5..6: note = Xaa is C or S
VPKPXXAPTQLEPLPVVYY

SEQ ID NO: 2154 - protein, 20 aa, synthetic construct
  REGION 1..20: note = GFR-binding peptide
  VARIANT 6..7: note = Xaa is C or S
STPPTXXVPTRLNAISILYF

SEQ ID NO: 2155 - protein, 15 aa, synthetic construct
  REGION 1..15: note = GFR-binding peptide
  VARIANT 1..2: note = Xaa is C or S
XXAPTQLEPLTVLYY

SEQ ID NO: 2156 - protein, 13 aa, synthetic construct
  REGION 1..13: note = GFR-binding peptide
VPTRLNAISILYF

SEQ ID NO: 2157 - protein, 17 aa, synthetic construct
  REGION 1..17: note = GFR-binding peptide
  VARIANT 3..4: note = Xaa is C or S
SPXXVPQDLSPISILFI

SEQ ID NO: 2158 - protein, 19 aa, synthetic construct
  REGION 1..19: note = GFR-binding peptide
  VARIANT 5..6: note = Xaa is C or S
SAAPXXVPQALSAISILYL

SEQ ID NO: 2159 - protein, 15 aa, synthetic construct
  REGION 1..15: note = GFR-binding peptide
  VARIANT 1..2: note = Xaa is C or S
XXVPTELNAISMLYF

SEQ ID NO: 2160 - protein, 20 aa, synthetic construct
  REGION 1..20: note = GFR-binding peptide
  VARIANT 6..7: note = Xaa is C or S
ASASPXXVPQDLSAISILYL

SEQ ID NO: 2161 - protein, 16 aa, synthetic construct
  REGION 1..16: note = GFR-binding peptide
  VARIANT 2..3: note = Xaa is C or S
PXXVPQALSPISILFI

SEQ ID NO: 2162 - protein, 18 aa, synthetic construct
  REGION 1..18: note = GFR-binding peptide
  VARIANT 4..5: note = Xaa is C or S
ASPXXVPQDLEPLPIVYY

SEQ ID NO: 2163 - protein, 15 aa, synthetic construct
  REGION 1..15: note = GFR-binding peptide
  VARIANT 2: note = Xaa is C or S
TXAPTKLSAISVLYL

SEQ ID NO: 2164 - protein, 12 aa, synthetic construct
  REGION 1..12: note = GFR-binding peptide
PTKLSAISVLYL

SEQ ID NO: 2165 - protein, 12 aa, synthetic construct
  REGION 1..12: note = GFR-binding peptide
PTQLSPISVLFI

SEQ ID NO: 2166 - protein, 15 aa, synthetic construct
  REGION 1..15: note = GFR-binding peptide
  VARIANT 1..2: note = Xaa is C or S
XXVPTRLSAISILYL

SEQ ID NO: 2167 - protein, 12 aa, synthetic construct
  REGION 1..12: note = GFR-binding peptide
PTKLSPISVLFI

SEQ ID NO: 2168 - protein, 13 aa, synthetic construct
  REGION 1..13: note = GFR-binding peptide
VPTELNAISMLYF

SEQ ID NO: 2169 - protein, 12 aa, synthetic construct
  REGION 1..12: note = GFR-binding peptide
PQALEPLTILYY

SEQ ID NO: 2170 - protein, 15 aa, synthetic construct
  REGION 1..15: note = GFR-binding peptide
  VARIANT 1..2: note = Xaa is C or S
XXVPTRLNAISILYF

SEQ ID NO: 2171 - protein, 18 aa, synthetic construct
  REGION 1..18: note = GFR-binding peptide
  VARIANT 5: note = Xaa is C or S
TKPTXAPTKLEPLPVVYY

SEQ ID NO: 2172 - protein, 11 aa, synthetic construct
  REGION 1..11: note = GFR-binding peptide
TRLNAISILYF

SEQ ID NO: 2173 - protein, 15 aa, synthetic construct
  REGION 1..15: note = GFR-binding peptide
  VARIANT 1..2: note = Xaa is C or S
XXVPQALEPLTILYY

SEQ ID NO: 2174 - protein, 13 aa, synthetic construct
  REGION 1..13: note = GFR-binding peptide
APTKLEPLTVLYY

SEQ ID NO: 2175 - protein, 20 aa, synthetic construct
  REGION 1..20: note = GFR-binding peptide
  VARIANT 6..7: note = Xaa is C or S
KIPKAXXVPTELEPLPMVYY

SEQ ID NO: 2176 - protein, 10 aa, synthetic construct
  REGION 1..10: note = GFR-binding peptide
ALEPLTILYY

SEQ ID NO: 2177 - protein, 14 aa, synthetic construct
  REGION 1..14: note = GFR-binding peptide
  VARIANT 1: note = Xaa is C or S
XVPQALEPLTILYY

SEQ ID NO: 2178 - protein, 16 aa, synthetic construct
  REGION 1..16: note = GFR-binding peptide
  VARIANT 2..3: note = Xaa is C or S
PXXVSQDLNAISILYF

SEQ ID NO: 2179 - protein, 17 aa, synthetic construct
  REGION 1..17: note = GFR-binding peptide
  VARIANT 3..4: note = Xaa is C or S
SPXXVSQDLSPISILFI

SEQ ID NO: 2180 - protein, 14 aa, synthetic construct
  REGION 1..14: note = GFR-binding peptide
  VARIANT 1: note = Xaa is C or S
XVPTELNAISMLYF

SEQ ID NO: 2181 - protein, 17 aa, synthetic construct
  REGION 1..17: note = GFR-binding peptide
  VARIANT 3..4: note = Xaa is C or S
SPXXVSQDLSAISILYL

SEQ ID NO: 2182 - protein, 20 aa, synthetic construct
  REGION 1..20: note = GFR-binding peptide
  VARIANT 6..7: note = Xaa is C or S
ASASPXXVPQDLNAISILYF

SEQ ID NO: 2183 - protein, 12 aa, synthetic construct
  REGION 1..12: note = GFR-binding peptide
PTQLSAISVLYL

SEQ ID NO: 2184 - protein, 15 aa, synthetic construct
  REGION 1..15: note = GFR-binding peptide
  VARIANT 1..2: note = Xaa is C or S
XXAPTKLEPLTVLYY

SEQ ID NO: 2185 - protein, 20 aa, synthetic construct
  REGION 1..20: note = GFR-binding peptide
  VARIANT 7: note = Xaa is C or S
HVTKPTXAPTKLEPLTVLYY

SEQ ID NO: 2186 - protein, 12 aa, synthetic construct
  REGION 1..12: note = GFR-binding peptide
PQDLEPLPIVYY

SEQ ID NO: 2187 - protein, 14 aa, synthetic construct
  REGION 1..14: note = GFR-binding peptide
  VARIANT 1: note = Xaa is C or S
XAPTKLEPLPVVYY

SEQ ID NO: 2188 - protein, 16 aa, synthetic construct
  REGION 1..16: note = GFR-binding peptide
  VARIANT 2..3: note = Xaa is C or S
TXXVPTRLEPLPIVYY

SEQ ID NO: 2189 - protein, 18 aa, synthetic construct
  REGION 1..18: note = GFR-binding peptide
  VARIANT 4..5: note = Xaa is C or S
PKPXXAPTQLEPLPVVYY

SEQ ID NO: 2190 - protein, 16 aa, synthetic construct
  REGION 1..16: note = GFR-binding peptide
  VARIANT 2..3: note = Xaa is C or S
PXXAPTQLEPLTVLYY

SEQ ID NO: 2191 - protein, 17 aa, synthetic construct
  REGION 1..17: note = GFR-binding peptide
  VARIANT 3..4: note = Xaa is C or S
PTXXVPTRLNAISILYF

SEQ ID NO: 2192 - protein, 16 aa, synthetic construct
  REGION 1..16: note = GFR-binding peptide
  VARIANT 2..3: note = Xaa is C or S
PXXVSQDLSAISILYL

SEQ ID NO: 2193 - protein, 19 aa, synthetic construct
  REGION 1..19: note = GFR-binding peptide
  VARIANT 6: note = Xaa is C or S
VTKPTXAPTKLEPLPVVYY

SEQ ID NO: 2194 - protein, 13 aa, synthetic construct
  REGION 1..13: note = GFR-binding peptide
APTQLEPLPVVYY

SEQ ID NO: 2195 - protein, 16 aa, synthetic construct
  REGION 1..16: note = GFR-binding peptide
  VARIANT 2..3: note = Xaa is C or S
PXXVSQDLSPISILFI

SEQ ID NO: 2196 - protein, 16 aa, synthetic construct
  REGION 1..16: note = GFR-binding peptide
  VARIANT 2..3: note = Xaa is C or S
AXXVPTELEPLPMVYY

SEQ ID NO: 2197 - protein, 12 aa, synthetic construct
  REGION 1..12: note = GFR-binding peptide
PTELSPISMLFI

SEQ ID NO: 2198 - protein, 18 aa, synthetic construct
  REGION 1..18: note = GFR-binding peptide
  VARIANT 4..5: note = Xaa is C or S
PPTXXVPTRLSAISILYL

SEQ ID NO: 2199 - protein, 14 aa, synthetic construct
  REGION 1..14: note = GFR-binding peptide
  VARIANT 1: note = Xaa is C or S
XVPTELSPISMLFI

SEQ ID NO: 2200 - protein, 17 aa, synthetic construct
  REGION 1..17: note = GFR-binding peptide
  VARIANT 3..4: note = Xaa is C or S
SPXXVSQDLNAISILYF

SEQ ID NO: 2201 - protein, 16 aa, synthetic construct
  REGION 1..16: note = GFR-binding peptide
  VARIANT 14..15: note = Xaa is C or S
YYLITLPELDQPVXXP

SEQ ID NO: 2202 - protein, 13 aa, synthetic construct
  REGION 1..13: note = GFR-binding peptide
IFLVSIPSLKTPA

SEQ ID NO: 2203 - protein, 13 aa, synthetic construct
  REGION 1..13: note = GFR-binding peptide
LYLVSIASLQTPA

SEQ ID NO: 2204 - protein, 14 aa, synthetic construct
  REGION 1..14: note = GFR-binding peptide
  VARIANT 14: note = Xaa is C or S
IFLISIPSLAQPVX

SEQ ID NO: 2205 - protein, 20 aa, synthetic construct
  REGION 1..20: note = GFR-binding peptide
  VARIANT 14: note = Xaa is C or S
IFLVSIPSLKTPAXTPKTVH

SEQ ID NO: 2206 - protein, 11 aa, synthetic construct
  REGION 1..11: note = GFR-binding peptide
YYVIPLPELAQ

SEQ ID NO: 2207 - protein, 11 aa, synthetic construct
  REGION 1..11: note = GFR-binding peptide
YYLVTLPELQT

SEQ ID NO: 2208 - protein, 13 aa, synthetic construct
  REGION 1..13: note = GFR-binding peptide
YYVIPLPELDQPV

SEQ ID NO: 2209 - protein, 19 aa, synthetic construct
  REGION 1..19: note = GFR-binding peptide
  VARIANT 14..15: note = Xaa is C or S
YYLVTLPELKTPAXXPKPV

SEQ ID NO: 2210 - protein, 19 aa, synthetic construct
  REGION 1..19: note = GFR-binding peptide
  VARIANT 14..15: note = Xaa is C or S
LYLISIASLDQSVXXPSAS

SEQ ID NO: 2211 - protein, 10 aa, synthetic construct
  REGION 1..10: note = GFR-binding peptide
YYLITLPELD

SEQ ID NO: 2212 - protein, 15 aa, synthetic construct
  REGION 1..15: note = GFR-binding peptide
  VARIANT 14..15: note = Xaa is C or S
YYLITLPELDQPVXX

SEQ ID NO: 2213 - protein, 17 aa, synthetic construct
  REGION 1..17: note = GFR-binding peptide
  VARIANT 14..15: note = Xaa is C or S
YYLVTLPELQTPAXXPK

SEQ ID NO: 2214 - protein, 18 aa, synthetic construct
  REGION 1..18: note = GFR-binding peptide
  VARIANT 14: note = Xaa is C or S
YYLVTLPELKTPAXTPKT

SEQ ID NO: 2215 - protein, 11 aa, synthetic construct
  REGION 1..11: note = GFR-binding peptide
FYLISIANLDQ

SEQ ID NO: 2216 - protein, 16 aa, synthetic construct
  REGION 1..16: note = GFR-binding peptide
  VARIANT 14..15: note = Xaa is C or S
YYVVPLPELKTPAXXP

SEQ ID NO: 2217 - protein, 13 aa, synthetic construct
  REGION 1..13: note = GFR-binding peptide
LYLISIASLRTPV

SEQ ID NO: 2218 - protein, 16 aa, synthetic construct
  REGION 1..16: note = GFR-binding peptide
  VARIANT 14: note = Xaa is C or S
YYLVTLPELKTPAXTP

SEQ ID NO: 2219 - protein, 13 aa, synthetic construct
  REGION 1..13: note = GFR-binding peptide
LYLISIASLAQPV

SEQ ID NO: 2220 - protein, 10 aa, synthetic construct
  REGION 1..10: note = GFR-binding peptide
LYLISIASLA

SEQ ID NO: 2221 - protein, 19 aa, synthetic construct
  REGION 1..19: note = GFR-binding peptide
  VARIANT 14..15: note = Xaa is C or S
IFLISIPSLDQPVXXPSAS

SEQ ID NO: 2222 - protein, 9 aa, synthetic construct
  REGION 1..9: note = GFR-binding peptide
YYVVPLPEL

SEQ ID NO: 2223 - protein, 20 aa, synthetic construct
  REGION 1..20: note = GFR-binding peptide
  VARIANT 14..15: note = Xaa is C or S
IFLVSIPSLKTPAXXPKPVY

SEQ ID NO: 2224 - protein, 16 aa, synthetic construct
  REGION 1..16: note = GFR-binding peptide
  VARIANT 14..15: note = Xaa is C or S
IFLMSIPSLETPVXXA

SEQ ID NO: 2225 - protein, 20 aa, synthetic construct
  REGION 1..20: note = GFR-binding peptide
  VARIANT 14..15: note = Xaa is C or S
IFLMSIPSLETPVXXAKPIS

SEQ ID NO: 2226 - protein, 10 aa, synthetic construct
  REGION 1..10: note = GFR-binding peptide
YYVIPLPELD

SEQ ID NO: 2227 - protein, 13 aa, synthetic construct
  REGION 1..13: note = GFR-binding peptide
YYLMTLPELETPV

SEQ ID NO: 2228 - protein, 11 aa, synthetic construct
  REGION 1..11: note = GFR-binding peptide
YYVIPLPELRT

SEQ ID NO: 2229 - protein, 19 aa, synthetic construct
  REGION 1..19: note = GFR-binding peptide
  VARIANT 14..15: note = Xaa is C or S
YYVVPLPELKTPAXXPKPV

SEQ ID NO: 2230 - protein, 15 aa, synthetic construct
  REGION 1..15: note = GFR-binding peptide
  VARIANT 14..15: note = Xaa is C or S
YYLMTLPELETPVXX

SEQ ID NO: 2231 - protein, 9 aa, synthetic construct
  REGION 1..9: note = GFR-binding peptide
IFLMSIPSL

SEQ ID NO: 2232 - protein, 14 aa, synthetic construct
  REGION 1..14: note = GFR-binding peptide
  VARIANT 14: note = Xaa is C or S
YYLITLPELDQSVX

SEQ ID NO: 2233 - protein, 15 aa, synthetic construct
  REGION 1..15: note = GFR-binding peptide
  VARIANT 14..15: note = Xaa is C or S
IFLISIPSLDQSVXX

SEQ ID NO: 2234 - protein, 16 aa, synthetic construct
  REGION 1..16: note = GFR-binding peptide
  VARIANT 14..15: note = Xaa is C or S
YYVIPLPELDQPVXXP

SEQ ID NO: 2235 - protein, 11 aa, synthetic construct
  REGION 1..11: note = GFR-binding peptide
YYVVPLPELQT

SEQ ID NO: 2236 - protein, 10 aa, synthetic construct
  REGION 1..10: note = GFR-binding peptide
FYLMSIANLE

SEQ ID NO: 2237 - protein, 17 aa, synthetic construct
  REGION 1..17: note = GFR-binding peptide
  VARIANT 14: note = Xaa is C or S
IFLVSIPSLKTPAXTPK

SEQ ID NO: 2238 - protein, 20 aa, synthetic construct
  REGION 1..20: note = GFR-binding peptide
  VARIANT 14..15: note = Xaa is C or S
LYLISIASLRTPVXXTPPTS

SEQ ID NO: 2239 - protein, 17 aa, synthetic construct
  REGION 1..17: note = GFR-binding peptide
  VARIANT 14..15: note = Xaa is C or S
YYVVPLPELQTPAXXPK

SEQ ID NO: 2240 - protein, 12 aa, synthetic construct
  REGION 1..12: note = GFR-binding peptide
LYLISIASLDQS

SEQ ID NO: 2241 - protein, 14 aa, synthetic construct
  REGION 1..14: note = GFR-binding peptide
  VARIANT 14: note = Xaa is C or S
YYVVPLPELQTPAX

SEQ ID NO: 2242 - protein, 17 aa, synthetic construct
  REGION 1..17: note = GFR-binding peptide
  VARIANT 14: note = Xaa is C or S
YYVVPLPELKTPAXTPK

SEQ ID NO: 2243 - protein, 19 aa, synthetic construct
  REGION 1..19: note = GFR-binding peptide
  VARIANT 14..15: note = Xaa is C or S
IFLMSIPSLETPVXXAKPI

SEQ ID NO: 2244 - protein, 10 aa, synthetic construct
  REGION 1..10: note = GFR-binding peptide
YYLITLPELR

SEQ ID NO: 2245 - protein, 19 aa, synthetic construct
  REGION 1..19: note = GFR-binding peptide
  VARIANT 14..15: note = Xaa is C or S
LYLISIASLRTPVXXTPPT

SEQ ID NO: 2246 - protein, 16 aa, synthetic construct
  REGION 1..16: note = GFR-binding peptide
  VARIANT 14: note = Xaa is C or S
YYVVPLPELKTPAXTP

SEQ ID NO: 2247 - protein, 17 aa, synthetic construct
  REGION 1..17: note = GFR-binding peptide
  VARIANT 14..15: note = Xaa is C or S
YYVIPLPELDQSVXXPS

SEQ ID NO: 2248 - protein, 16 aa, synthetic construct
  REGION 1..16: note = GFR-binding peptide
  VARIANT 14..15: note = Xaa is C or S
YYLVTLPELKTPAXXP

SEQ ID NO: 2249 - protein, 19 aa, synthetic construct
  REGION 1..19: note = GFR-binding peptide
  VARIANT 14..15: note = Xaa is C or S
IFLISIPSLAQPVXXPAAS

SEQ ID NO: 2250 - protein, 14 aa, synthetic construct
  REGION 1..14: note = GFR-binding peptide
  VARIANT 14: note = Xaa is C or S
YYVIPLPELRTPVX

SEQ ID NO: 2251 - protein, 10 aa, synthetic construct
  REGION 1..10: note = GFR-binding peptide
FYLVSIANLK

SEQ ID NO: 2252 - protein, 20 aa, synthetic construct
  REGION 1..20: note = GFR-binding peptide
  VARIANT 14..15: note = Xaa is C or S
YYLMTLPELETPVXXAKPIK

SEQ ID NO: 2253 - protein, 16 aa, synthetic construct
  REGION 1..16: note = GFR-binding peptide
  VARIANT 14..15: note = Xaa is C or S
LYLISIASLAQPVXXP

SEQ ID NO: 2254 - protein, 16 aa, synthetic construct
  REGION 1..16: note = GFR-binding peptide
  VARIANT 14..15: note = Xaa is C or S
LYLVSIASLQTPAXXP

SEQ ID NO: 2255 - protein, 18 aa, synthetic construct
  REGION 1..18: note = GFR-binding peptide
  VARIANT 14..15: note = Xaa is C or S
FYLVSIANLQTPAXXPKP

SEQ ID NO: 2256 - protein, 15 aa, synthetic construct
  REGION 1..15: note = GFR-binding peptide
  VARIANT 14..15: note = Xaa is C or S
YYVVPLPELKTPAXX

SEQ ID NO: 2257 - protein, 13 aa, synthetic construct
  REGION 1..13: note = GFR-binding peptide
IFLISIPSLDQPV

SEQ ID NO: 2258 - protein, 15 aa, synthetic construct
  REGION 1..15: note = GFR-binding peptide
  VARIANT 14: note = Xaa is C or S
IFLVSIPSLKTPAXT

SEQ ID NO: 2259 - protein, 13 aa, synthetic construct
  REGION 1..13: note = GFR-binding peptide
YYVVPLPELKTPA

SEQ ID NO: 2260 - protein, 13 aa, synthetic construct
  REGION 1..13: note = GFR-binding peptide
IFLMSIPSLETPV

SEQ ID NO: 2261 - protein, 10 aa, synthetic construct
  REGION 1..10: note = GFR-binding peptide
YYVIPLPELR

SEQ ID NO: 2262 - protein, 20 aa, synthetic construct
  REGION 1..20: note = GFR-binding peptide
  VARIANT 14..15: note = Xaa is C or S
YYVMPLPELETPVXXAKPIS

SEQ ID NO: 2263 - protein, 16 aa, synthetic construct
  REGION 1..16: note = GFR-binding peptide
  VARIANT 14..15: note = Xaa is C or S
YYLITLPELRTPVXXT

SEQ ID NO: 2264 - protein, 12 aa, synthetic construct
  REGION 1..12: note = GFR-binding peptide
LYLISIASLRTP

SEQ ID NO: 2265 - protein, 14 aa, synthetic construct
  REGION 1..14: note = GFR-binding peptide
  VARIANT 14: note = Xaa is C or S
YYLITLPELRTPVX

SEQ ID NO: 2266 - protein, 14 aa, synthetic construct
  REGION 1..14: note = GFR-binding peptide
  VARIANT 14: note = Xaa is C or S
YYLVTLPELKTPAX

SEQ ID NO: 2267 - protein, 16 aa, synthetic construct
  REGION 1..16: note = GFR-binding peptide
  VARIANT 14: note = Xaa is C or S
IFLVSIPSLKTPAXTP

SEQ ID NO: 2268 - protein, 17 aa, synthetic construct
  REGION 1..17: note = GFR-binding peptide
  VARIANT 14: note = Xaa is C or S
YYLVTLPELKTPAXTPK

SEQ ID NO: 2269 - protein, 14 aa, synthetic construct
  REGION 1..14: note = GFR-binding peptide
  VARIANT 14: note = Xaa is C or S
IFLISIPSLDQSVX

SEQ ID NO: 2270 - protein, 19 aa, synthetic construct
  REGION 1..19: note = GFR-binding peptide
  VARIANT 14: note = Xaa is C or S
YYLVTLPELKTPAXTPKTV

SEQ ID NO: 2271 - protein, 9 aa, synthetic construct
  REGION 1..9: note = GFR-binding peptide
IFLVSIPSL

SEQ ID NO: 2272 - protein, 15 aa, synthetic construct
  REGION 1..15: note = GFR-binding peptide
  VARIANT 14: note = Xaa is C or S
YYVVPLPELKTPAXT

SEQ ID NO: 2273 - protein, 16 aa, synthetic construct
  REGION 1..16: note = GFR-binding peptide
  VARIANT 14..15: note = Xaa is C or S
YYLMTLPELETPVXXA

SEQ ID NO: 2274 - protein, 13 aa, synthetic construct
  REGION 1..13: note = GFR-binding peptide
LYLISIASLDQSV

SEQ ID NO: 2275 - protein, 11 aa, synthetic construct
  REGION 1..11: note = GFR-binding peptide
IFLISIPSLAQ

SEQ ID NO: 2276 - protein, 11 aa, synthetic construct
  REGION 1..11: note = GFR-binding peptide
FYLVSIANLKT

SEQ ID NO: 2277 - protein, 14 aa, synthetic construct
  REGION 1..14: note = GFR-binding peptide
  VARIANT 14: note = Xaa is C or S
YYLVTLPELQTPAX

SEQ ID NO: 2278 - protein, 15 aa, synthetic construct
  REGION 1..15: note = GFR-binding peptide
  VARIANT 14..15: note = Xaa is C or S
YYVIPLPELDQPVXX

SEQ ID NO: 2279 - protein, 13 aa, synthetic construct
  REGION 1..13: note = GFR-binding peptide
IFLISIPSLDQSV

SEQ ID NO: 2280 - protein, 17 aa, synthetic construct
  REGION 1..17: note = GFR-binding peptide
  VARIANT 14..15: note = Xaa is C or S
FYLISIANLDQPVXXPS

SEQ ID NO: 2281 - protein, 18 aa, synthetic construct
  REGION 1..18: note = GFR-binding peptide
  VARIANT 14..15: note = Xaa is C or S
IFLISIPSLDQPVXXPSA

SEQ ID NO: 2282 - protein, 18 aa, synthetic construct
  REGION 1..18: note = GFR-binding peptide
  VARIANT 14..15: note = Xaa is C or S
LYLISIASLDQPVXXPSA

SEQ ID NO: 2283 - protein, 20 aa, synthetic construct
  REGION 1..20: note = GFR-binding peptide
  VARIANT 14: note = Xaa is C or S
YYVVPLPELKTPAXTPKTVH

SEQ ID NO: 2284 - protein, 19 aa, synthetic construct
  REGION 1..19: note = GFR-binding peptide
  VARIANT 14..15: note = Xaa is C or S
YYLMTLPELETPVXXAKPI

SEQ ID NO: 2285 - protein, 15 aa, synthetic construct
  REGION 1..15: note = GFR-binding peptide
  VARIANT 14..15: note = Xaa is C or S
LYLISIASLAQPVXX

SEQ ID NO: 2286 - protein, 15 aa, synthetic construct
  REGION 1..15: note = GFR-binding peptide
  VARIANT 14..15: note = Xaa is C or S
IFLISIPSLAQPVXX

SEQ ID NO: 2287 - protein, 16 aa, synthetic construct
  REGION 1..16: note = GFR-binding peptide
  VARIANT 14..15: note = Xaa is C or S
IFLISIPSLDQPVXXP

SEQ ID NO: 2288 - protein, 17 aa, synthetic construct
  REGION 1..17: note = GFR-binding peptide
  VARIANT 14..15: note = Xaa is C or S
YYLMTLPELETPVXXAK

SEQ ID NO: 2289 - protein, 16 aa, synthetic construct
  REGION 1..16: note = GFR-binding peptide
  VARIANT 14..15: note = Xaa is C or S
IFLVSIPSLKTPAXXP

SEQ ID NO: 2290 - protein, 14 aa, synthetic construct
  REGION 1..14: note = GFR-binding peptide
  VARIANT 14: note = Xaa is C or S
IFLISIPSLRTPVX

SEQ ID NO: 2291 - protein, 18 aa, synthetic construct
  REGION 1..18: note = GFR-binding peptide
  VARIANT 14..15: note = Xaa is C or S
FYLMSIANLETPVXXAKP

SEQ ID NO: 2292 - protein, 17 aa, synthetic construct
  REGION 1..17: note = GFR-binding peptide
  VARIANT 14..15: note = Xaa is C or S
YYLITLPELAQPVXXPA

SEQ ID NO: 2293 - protein, 10 aa, synthetic construct
  REGION 1..10: note = GFR-binding peptide
YYLVTLPELQ

SEQ ID NO: 2294 - protein, 19 aa, synthetic construct
  REGION 1..19: note = GFR-binding peptide
  VARIANT 14..15: note = Xaa is C or S
YYVIPLPELDQPVXXPSAS

SEQ ID NO: 2295 - protein, 11 aa, synthetic construct
  REGION 1..11: note = GFR-binding peptide
YYLITLPELAQ

SEQ ID NO: 2296 - protein, 19 aa, synthetic construct
  REGION 1..19: note = GFR-binding peptide
  VARIANT 14..15: note = Xaa is C or S
YYVIPLPELAQPVXXPAAS

SEQ ID NO: 2297 - protein, 14 aa, synthetic construct
  REGION 1..14: note = GFR-binding peptide
  VARIANT 14: note = Xaa is C or S
IFLVSIPSLQTPAX

SEQ ID NO: 2298 - protein, 19 aa, synthetic construct
  REGION 1..19: note = GFR-binding peptide
  VARIANT 14..15: note = Xaa is C or S
IFLVSIPSLQTPAXXPKPV

SEQ ID NO: 2299 - protein, 17 aa, synthetic construct
  REGION 1..17: note = GFR-binding peptide
  VARIANT 14..15: note = Xaa is C or S
FYLMSIANLETPVXXAK

SEQ ID NO: 2300 - protein, 12 aa, synthetic construct
  REGION 1..12: note = GFR-binding peptide
FYLISIANLRTP

SEQ ID NO: 2301 - protein, 20 aa, synthetic construct
  REGION 1..20: note = GFR-binding peptide
  VARIANT 14..15: note = Xaa is C or S
IFLVSIPSLQTPAXXPKPVT

SEQ ID NO: 2302 - protein, 17 aa, synthetic construct
  REGION 1..17: note = GFR-binding peptide
  VARIANT 14..15: note = Xaa is C or S
FYLISIANLAQPVXXPA

SEQ ID NO: 2303 - protein, 9 aa, synthetic construct
  REGION 1..9: note = GFR-binding peptide
YYVMPLPEL

SEQ ID NO: 2304 - protein, 14 aa, synthetic construct
  REGION 1..14: note = GFR-binding peptide
  VARIANT 14: note = Xaa is C or S
YYVIPLPELDQSVX

SEQ ID NO: 2305 - protein, 20 aa, synthetic construct
  REGION 1..20: note = GFR-binding peptide
  VARIANT 14..15: note = Xaa is C or S
LYLVSIASLQTPAXXPKPVT

SEQ ID NO: 2306 - protein, 18 aa, synthetic construct
  REGION 1..18: note = GFR-binding peptide
  VARIANT 14..15: note = Xaa is C or S
LYLMSIASLETPVXXAKP

SEQ ID NO: 2307 - protein, 18 aa, synthetic construct
  REGION 1..18: note = GFR-binding peptide
  VARIANT 14..15: note = Xaa is C or S
LYLISIASLAQPVXXPAA

SEQ ID NO: 2308 - protein, 13 aa, synthetic construct
  REGION 1..13: note = GFR-binding peptide
YYVMPLPELETPV

SEQ ID NO: 2309 - protein, 17 aa, synthetic construct
  REGION 1..17: note = GFR-binding peptide
  VARIANT 14..15: note = Xaa is C or S
YYLITLPELDQPVXXPS

SEQ ID NO: 2310 - protein, 11 aa, synthetic construct
  REGION 1..11: note = GFR-binding peptide
IFLVSIPSLQT

SEQ ID NO: 2311 - protein, 18 aa, synthetic construct
  REGION 1..18: note = GFR-binding peptide
  VARIANT 14..15: note = Xaa is C or S
IFLISIPSLAQPVXXPAA

SEQ ID NO: 2312 - protein, 19 aa, synthetic construct
  REGION 1..19: note = GFR-binding peptide
  VARIANT 14..15: note = Xaa is C or S
LYLVSIASLQTPAXXPKPV

SEQ ID NO: 2313 - protein, 15 aa, synthetic construct
  REGION 1..15: note = GFR-binding peptide
  VARIANT 14..15: note = Xaa is C or S
YYVMPLPELETPVXX

SEQ ID NO: 2314 - protein, 9 aa, synthetic construct
  REGION 1..9: note = GFR-binding peptide
YYLVTLPEL

SEQ ID NO: 2315 - protein, 11 aa, synthetic construct
  REGION 1..11: note = GFR-binding peptide
FYLMSIANLET

SEQ ID NO: 2316 - protein, 13 aa, synthetic construct
  REGION 1..13: note = GFR-binding peptide
IFLVSIPSLQTPA

SEQ ID NO: 2317 - protein, 14 aa, synthetic construct
  REGION 1..14: note = GFR-binding peptide
  VARIANT 14: note = Xaa is C or S
LYLISIASLAQPVX

SEQ ID NO: 2318 - protein, 11 aa, synthetic construct
  REGION 1..11: note = GFR-binding peptide
LYLMSIASLET

SEQ ID NO: 2319 - protein, 20 aa, synthetic construct
  REGION 1..20: note = GFR-binding peptide
  VARIANT 14: note = Xaa is C or S
LYLVSIASLKTPAXTPKTVH

SEQ ID NO: 2320 - protein, 18 aa, synthetic construct
  REGION 1..18: note = GFR-binding peptide
  VARIANT 14..15: note = Xaa is C or S
YYVIPLPELAQPVXXPAA

SEQ ID NO: 2321 - protein, 13 aa, synthetic construct
  REGION 1..13: note = GFR-binding peptide
LYLVSIASLKTPA

SEQ ID NO: 2322 - protein, 13 aa, synthetic construct
  REGION 1..13: note = GFR-binding peptide
YYVIPLPELDQSV

SEQ ID NO: 2323 - protein, 16 aa, synthetic construct
  REGION 1..16: note = GFR-binding peptide
  VARIANT 14..15: note = Xaa is C or S
YYLITLPELDQSVXXP

SEQ ID NO: 2324 - protein, 19 aa, synthetic construct
  REGION 1..19: note = GFR-binding peptide
  VARIANT 14..15: note = Xaa is C or S
YYLVTLPELQTPAXXPKPV

SEQ ID NO: 2325 - protein, 14 aa, synthetic construct
  REGION 1..14: note = GFR-binding peptide
  VARIANT 14: note = Xaa is C or S
YYLMTLPELETPVX

SEQ ID NO: 2326 - protein, 8 aa, synthetic construct
  REGION 1..8: note = GFR-binding peptide
YYVIPLPE

SEQ ID NO: 2327 - protein, 10 aa, synthetic construct
  REGION 1..10: note = GFR-binding peptide
IFLISIPSLA

SEQ ID NO: 2328 - protein, 14 aa, synthetic construct
  REGION 1..14: note = GFR-binding peptide
  VARIANT 14: note = Xaa is C or S
FYLVSIANLKTPAX

SEQ ID NO: 2329 - protein, 15 aa, synthetic construct
  REGION 1..15: note = GFR-binding peptide
  VARIANT 14..15: note = Xaa is C or S
YYVIPLPELRTPVXX

SEQ ID NO: 2330 - protein, 20 aa, synthetic construct
  REGION 1..20: note = GFR-binding peptide
  VARIANT 14..15: note = Xaa is C or S
YYLVTLPELKTPAXXPKPVY

SEQ ID NO: 2331 - protein, 14 aa, synthetic construct
  REGION 1..14: note = GFR-binding peptide
  VARIANT 14: note = Xaa is C or S
YYVMPLPELETPVX

SEQ ID NO: 2332 - protein, 17 aa, synthetic construct
  REGION 1..17: note = GFR-binding peptide
  VARIANT 14..15: note = Xaa is C or S
YYVIPLPELDQPVXXPS

SEQ ID NO: 2333 - protein, 19 aa, synthetic construct
  REGION 1..19: note = GFR-binding peptide
  VARIANT 14..15: note = Xaa is C or S
LYLISIASLDQPVXXPSAS

SEQ ID NO: 2334 - protein, 10 aa, synthetic construct
  REGION 1..10: note = GFR-binding peptide
IFLISIPSLR

SEQ ID NO: 2335 - protein, 13 aa, synthetic construct
  REGION 1..13: note = GFR-binding peptide
IFLISIPSLAQPV

SEQ ID NO: 2336 - protein, 16 aa, synthetic construct
  REGION 1..16: note = GFR-binding peptide
  VARIANT 14..15: note = Xaa is C or S
LYLMSIASLETPVXXA

SEQ ID NO: 2337 - protein, 19 aa, synthetic construct
  REGION 1..19: note = GFR-binding peptide
  VARIANT 14: note = Xaa is C or S
FYLVSIANLKTPAXTPKTV

SEQ ID NO: 2338 - protein, 17 aa, synthetic construct
  REGION 1..17: note = GFR-binding peptide
  VARIANT 14: note = Xaa is C or S
LYLVSIASLKTPAXTPK

SEQ ID NO: 2339 - protein, 16 aa, synthetic construct
  REGION 1..16: note = GFR-binding peptide
  VARIANT 14..15: note = Xaa is C or S
YYVIPLPELDQSVXXP

SEQ ID NO: 2340 - protein, 15 aa, synthetic construct
  REGION 1..15: note = GFR-binding peptide
  VARIANT 14..15: note = Xaa is C or S
FYLISIANLDQPVXX

SEQ ID NO: 2341 - protein, 20 aa, synthetic construct
  REGION 1..20: note = GFR-binding peptide
  VARIANT 14..15: note = Xaa is C or S
YYLMTLPELETPVXXAKPIS

SEQ ID NO: 2342 - protein, 12 aa, synthetic construct
  REGION 1..12: note = GFR-binding peptide
IFLISIPSLDQS

SEQ ID NO: 2343 - protein, 8 aa, synthetic construct
  REGION 1..8: note = GFR-binding peptide
LYLMSIAS

SEQ ID NO: 2344 - protein, 16 aa, synthetic construct
  REGION 1..16: note = GFR-binding peptide
  VARIANT 14..15: note = Xaa is C or S
FYLISIANLRTPVXXT

SEQ ID NO: 2345 - protein, 9 aa, synthetic construct
  REGION 1..9: note = GFR-binding peptide
YYLMTLPEL

SEQ ID NO: 2346 - protein, 11 aa, synthetic construct
  REGION 1..11: note = GFR-binding peptide
LYLVSIASLKT

SEQ ID NO: 2347 - protein, 20 aa, synthetic construct
  REGION 1..20: note = GFR-binding peptide
  VARIANT 14..15: note = Xaa is C or S
FYLMSIANLETPVXXAKPIK

SEQ ID NO: 2348 - protein, 10 aa, synthetic construct
  REGION 1..10: note = GFR-binding peptide
YYLVTLPELK

SEQ ID NO: 2349 - protein, 15 aa, synthetic construct
  REGION 1..15: note = GFR-binding peptide
  VARIANT 14..15: note = Xaa is C or S
YYVIPLPELDQSVXX

SEQ ID NO: 2350 - protein, 12 aa, synthetic construct
  REGION 1..12: note = GFR-binding peptide
YYLMTLPELETP

SEQ ID NO: 2351 - protein, 20 aa, synthetic construct
  REGION 1..20: note = GFR-binding peptide
  VARIANT 14..15: note = Xaa is C or S
YYLVTLPELQTPAXXPKPVT

SEQ ID NO: 2352 - protein, 15 aa, synthetic construct
  REGION 1..15: note = GFR-binding peptide
  VARIANT 14..15: note = Xaa is C or S
FYLVSIANLQTPAXX

SEQ ID NO: 2353 - protein, 14 aa, synthetic construct
  REGION 1..14: note = GFR-binding peptide
  VARIANT 14: note = Xaa is C or S
IFLVSIPSLKTPAX

SEQ ID NO: 2354 - protein, 10 aa, synthetic construct
  REGION 1..10: note = GFR-binding peptide
FYLISIANLR

SEQ ID NO: 2355 - protein, 17 aa, synthetic construct
  REGION 1..17: note = GFR-binding peptide
  VARIANT 14..15: note = Xaa is C or S
LYLVSIASLKTPAXXPK

SEQ ID NO: 2356 - protein, 12 aa, synthetic construct
  REGION 1..12: note = GFR-binding peptide
FYLISIANLDQS

SEQ ID NO: 2357 - protein, 12 aa, synthetic construct
  REGION 1..12: note = GFR-binding peptide
YYVVPLPELKTP

SEQ ID NO: 2358 - protein, 10 aa, synthetic construct
  REGION 1..10: note = GFR-binding peptide
FYLISIANLA

SEQ ID NO: 2359 - protein, 15 aa, synthetic construct
  REGION 1..15: note = GFR-binding peptide
  VARIANT 14..15: note = Xaa is C or S
YYLITLPELRTPVXX

SEQ ID NO: 2360 - protein, 16 aa, synthetic construct
  REGION 1..16: note = GFR-binding peptide
  VARIANT 14..15: note = Xaa is C or S
IFLVSIPSLQTPAXXP

SEQ ID NO: 2361 - protein, 10 aa, synthetic construct
  REGION 1..10: note = GFR-binding peptide
IFLISIPSLD

SEQ ID NO: 2362 - protein, 19 aa, synthetic construct
  REGION 1..19: note = GFR-binding peptide
  VARIANT 14..15: note = Xaa is C or S
IFLVSIPSLKTPAXXPKPV

SEQ ID NO: 2363 - protein, 15 aa, synthetic construct
  REGION 1..15: note = GFR-binding peptide
  VARIANT 14..15: note = Xaa is C or S
IFLISIPSLDQPVXX

SEQ ID NO: 2364 - protein, 15 aa, synthetic construct
  REGION 1..15: note = GFR-binding peptide
  VARIANT 14..15: note = Xaa is C or S
FYLISIANLAQPVXX

SEQ ID NO: 2365 - protein, 13 aa, synthetic construct
  REGION 1..13: note = GFR-binding peptide
FYLVSIANLQTPA

SEQ ID NO: 2366 - protein, 13 aa, synthetic construct
  REGION 1..13: note = GFR-binding peptide
LYLISIASLDQPV

SEQ ID NO: 2367 - protein, 13 aa, synthetic construct
  REGION 1..13: note = GFR-binding peptide
FYLISIANLAQPV

SEQ ID NO: 2368 - protein, 19 aa, synthetic construct
  REGION 1..19: note = GFR-binding peptide
  VARIANT 14..15: note = Xaa is C or S
YYLITLPELAQPVXXPAAS

SEQ ID NO: 2369 - protein, 14 aa, synthetic construct
  REGION 1..14: note = GFR-binding peptide
  VARIANT 14: note = Xaa is C or S
IFLISIPSLDQPVX

SEQ ID NO: 2370 - protein, 14 aa, synthetic construct
  REGION 1..14: note = GFR-binding peptide
  VARIANT 14: note = Xaa is C or S
LYLISIASLDQPVX

SEQ ID NO: 2371 - protein, 10 aa, synthetic construct
  REGION 1..10: note = GFR-binding peptide
YYVVPLPELK

SEQ ID NO: 2372 - protein, 19 aa, synthetic construct
  REGION 1..19: note = GFR-binding peptide
  VARIANT 14..15: note = Xaa is C or S
YYVIPLPELRTPVXXTPPT

SEQ ID NO: 2373 - protein, 18 aa, synthetic construct
  REGION 1..18: note = GFR-binding peptide
  VARIANT 14..15: note = Xaa is C or S
LYLVSIASLKTPAXXPKP

SEQ ID NO: 2374 - protein, 14 aa, synthetic construct
  REGION 1..14: note = GFR-binding peptide
  VARIANT 14: note = Xaa is C or S
FYLISIANLDQSVX

SEQ ID NO: 2375 - protein, 17 aa, synthetic construct
  REGION 1..17: note = GFR-binding peptide
  VARIANT 14..15: note = Xaa is C or S
YYLITLPELRTPVXXTP

SEQ ID NO: 2376 - protein, 10 aa, synthetic construct
  REGION 1..10: note = GFR-binding peptide
YYVVPLPELQ

SEQ ID NO: 2377 - protein, 14 aa, synthetic construct
  REGION 1..14: note = GFR-binding peptide
  VARIANT 14: note = Xaa is C or S
FYLISIANLDQPVX

SEQ ID NO: 2378 - protein, 13 aa, synthetic construct
  REGION 1..13: note = GFR-binding peptide
FYLISIANLDQPV

SEQ ID NO: 2379 - protein, 15 aa, synthetic construct
  REGION 1..15: note = GFR-binding peptide
  VARIANT 14..15: note = Xaa is C or S
IFLVSIPSLKTPAXX

SEQ ID NO: 2380 - protein, 17 aa, synthetic construct
  REGION 1..17: note = GFR-binding peptide
  VARIANT 14..15: note = Xaa is C or S
YYLITLPELDQSVXXPS

SEQ ID NO: 2381 - protein, 17 aa, synthetic construct
  REGION 1..17: note = GFR-binding peptide
  VARIANT 14..15: note = Xaa is C or S
FYLVSIANLQTPAXXPK

SEQ ID NO: 2382 - protein, 12 aa, synthetic construct
  REGION 1..12: note = GFR-binding peptide
YYVMPLPELETP

SEQ ID NO: 2383 - protein, 18 aa, synthetic construct
  REGION 1..18: note = GFR-binding peptide
  VARIANT 14..15: note = Xaa is C or S
YYVIPLPELRTPVXXTPP

SEQ ID NO: 2384 - protein, 15 aa, synthetic construct
  REGION 1..15: note = GFR-binding peptide
  VARIANT 14..15: note = Xaa is C or S
LYLVSIASLKTPAXX

SEQ ID NO: 2385 - protein, 9 aa, synthetic construct
  REGION 1..9: note = GFR-binding peptide
IFLISIPSL

SEQ ID NO: 2386 - protein, 18 aa, synthetic construct
  REGION 1..18: note = GFR-binding peptide
  VARIANT 14..15: note = Xaa is C or S
IFLVSIPSLKTPAXXPKP

SEQ ID NO: 2387 - protein, 9 aa, synthetic construct
  REGION 1..9: note = GFR-binding peptide
LYLISIASL

SEQ ID NO: 2388 - protein, 17 aa, synthetic construct
  REGION 1..17: note = GFR-binding peptide
  VARIANT 14..15: note = Xaa is C or S
FYLVSIANLKTPAXXPK

SEQ ID NO: 2389 - protein, 10 aa, synthetic construct
  REGION 1..10: note = GFR-binding peptide
FYLISIANLD

SEQ ID NO: 2390 - protein, 8 aa, synthetic construct
  REGION 1..8: note = GFR-binding peptide
FYLVSIAN

SEQ ID NO: 2391 - protein, 18 aa, synthetic construct
  REGION 1..18: note = GFR-binding peptide
  VARIANT 14..15: note = Xaa is C or S
LYLVSIASLQTPAXXPKP

SEQ ID NO: 2392 - protein, 18 aa, synthetic construct
  REGION 1..18: note = GFR-binding peptide
  VARIANT 14..15: note = Xaa is C or S
IFLVSIPSLQTPAXXPKP

SEQ ID NO: 2393 - protein, 16 aa, synthetic construct
  REGION 1..16: note = GFR-binding peptide
  VARIANT 14..15: note = Xaa is C or S
FYLVSIANLQTPAXXP

SEQ ID NO: 2394 - protein, 15 aa, synthetic construct
  REGION 1..15: note = GFR-binding peptide
  VARIANT 14..15: note = Xaa is C or S
LYLVSIASLQTPAXX

SEQ ID NO: 2395 - protein, 15 aa, synthetic construct
  REGION 1..15: note = GFR-binding peptide
  VARIANT 14..15: note = Xaa is C or S
IFLVSIPSLQTPAXX

SEQ ID NO: 2396 - protein, 20 aa, synthetic construct
  REGION 1..20: note = GFR-binding peptide
  VARIANT 14..15: note = Xaa is C or S
LYLMSIASLETPVXXAKPIK

SEQ ID NO: 2397 - protein, 20 aa, synthetic construct
  REGION 1..20: note = GFR-binding peptide
  VARIANT 14..15: note = Xaa is C or S
FYLISIANLAQPVXXPAASA

SEQ ID NO: 2398 - protein, 19 aa, synthetic construct
  REGION 1..19: note = GFR-binding peptide
  VARIANT 14: note = Xaa is C or S
IFLVSIPSLKTPAXTPKTV

SEQ ID NO: 2399 - protein, 19 aa, synthetic construct
  REGION 1..19: note = GFR-binding peptide
  VARIANT 14: note = Xaa is C or S
LYLVSIASLKTPAXTPKTV

SEQ ID NO: 2400 - protein, 16 aa, synthetic construct
  REGION 1..16: note = GFR-binding peptide
  VARIANT 14..15: note = Xaa is C or S
YYVIPLPELAQPVXXP

SEQ ID NO: 2401 - protein, 20 aa, synthetic construct
  REGION 1..20: note = GFR-binding peptide
  VARIANT 14..15: note = Xaa is C or S
LYLISIASLAQPVXXPAASA

SEQ ID NO: 2402 - protein, 18 aa, synthetic construct
  REGION 1..18: note = GFR-binding peptide
  VARIANT 14..15: note = Xaa is C or S
FYLISIANLDQSVXXPSA

SEQ ID NO: 2403 - protein, 16 aa, synthetic construct
  REGION 1..16: note = GFR-binding peptide
  VARIANT 14..15: note = Xaa is C or S
LYLISIASLRTPVXXT

SEQ ID NO: 2404 - protein, 12 aa, synthetic construct
  REGION 1..12: note = GFR-binding peptide
LYLISIASLAQP

SEQ ID NO: 2405 - protein, 12 aa, synthetic construct
  REGION 1..12: note = GFR-binding peptide
IFLISIPSLAQP

SEQ ID NO: 2406 - protein, 16 aa, synthetic construct
  REGION 1..16: note = GFR-binding peptide
  VARIANT 14..15: note = Xaa is C or S
IFLISIPSLRTPVXXT

SEQ ID NO: 2407 - protein, 18 aa, synthetic construct
  REGION 1..18: note = GFR-binding peptide
  VARIANT 14: note = Xaa is C or S
IFLVSIPSLKTPAXTPKT

SEQ ID NO: 2408 - protein, 19 aa, synthetic construct
  REGION 1..19: note = GFR-binding peptide
  VARIANT 14..15: note = Xaa is C or S
YYVMPLPELETPVXXAKPI

SEQ ID NO: 2409 - protein, 18 aa, synthetic construct
  REGION 1..18: note = GFR-binding peptide
  VARIANT 14: note = Xaa is C or S
FYLVSIANLKTPAXTPKT

SEQ ID NO: 2410 - protein, 12 aa, synthetic construct
  REGION 1..12: note = GFR-binding peptide
YYLVTLPELKTP

SEQ ID NO: 2411 - protein, 12 aa, synthetic construct
  REGION 1..12: note = GFR-binding peptide
FYLISIANLAQP

SEQ ID NO: 2412 - protein, 13 aa, synthetic construct
  REGION 1..13: note = GFR-binding peptide
YYVIPLPELRTPV

SEQ ID NO: 2413 - protein, 12 aa, synthetic construct
  REGION 1..12: note = GFR-binding peptide
LYLISIASLDQP

SEQ ID NO: 2414 - protein, 12 aa, synthetic construct
  REGION 1..12: note = GFR-binding peptide
IFLISIPSLDQP

SEQ ID NO: 2415 - protein, 20 aa, synthetic construct
  REGION 1..20: note = GFR-binding peptide
  VARIANT 14..15: note = Xaa is C or S
IFLMSIPSLETPVXXAKPIK

SEQ ID NO: 2416 - protein, 15 aa, synthetic construct
  REGION 1..15: note = GFR-binding peptide
  VARIANT 14..15: note = Xaa is C or S
FYLVSIANLKTPAXX

SEQ ID NO: 2417 - protein, 15 aa, synthetic construct
  REGION 1..15: note = GFR-binding peptide
  VARIANT 14: note = Xaa is C or S
YYLVTLPELKTPAXT

SEQ ID NO: 2418 - protein, 10 aa, synthetic construct
  REGION 1..10: note = GFR-binding peptide
YYVMPLPELE

SEQ ID NO: 2419 - protein, 19 aa, synthetic construct
  REGION 1..19: note = GFR-binding peptide
  VARIANT 14..15: note = Xaa is C or S
YYVIPLPELDQSVXXPSAS

SEQ ID NO: 2420 - protein, 18 aa, synthetic construct
  REGION 1..18: note = GFR-binding peptide
  VARIANT 14: note = Xaa is C or S
LYLVSIASLKTPAXTPKT

SEQ ID NO: 2421 - protein, 11 aa, synthetic construct
  REGION 1..11: note = GFR-binding peptide
YYLITLPELRT

SEQ ID NO: 2422 - protein, 18 aa, synthetic construct
  REGION 1..18: note = GFR-binding peptide
  VARIANT 14..15: note = Xaa is C or S
FYLVSIANLKTPAXXPKP

SEQ ID NO: 2423 - protein, 18 aa, synthetic construct
  REGION 1..18: note = GFR-binding peptide
  VARIANT 14..15: note = Xaa is C or S
IFLISIPSLDQSVXXPSA

SEQ ID NO: 2424 - protein, 17 aa, synthetic construct
  REGION 1..17: note = GFR-binding peptide
  VARIANT 14..15: note = Xaa is C or S
IFLVSIPSLQTPAXXPK

SEQ ID NO: 2425 - protein, 20 aa, synthetic construct
  REGION 1..20: note = GFR-binding peptide
  VARIANT 14..15: note = Xaa is C or S
YYVVPLPELKTPAXXPKPVY

SEQ ID NO: 2426 - protein, 18 aa, synthetic construct
  REGION 1..18: note = GFR-binding peptide
  VARIANT 14..15: note = Xaa is C or S
LYLISIASLDQSVXXPSA

SEQ ID NO: 2427 - protein, 17 aa, synthetic construct
  REGION 1..17: note = GFR-binding peptide
  VARIANT 14..15: note = Xaa is C or S
LYLVSIASLQTPAXXPK

SEQ ID NO: 2428 - protein, 9 aa, synthetic construct
  REGION 1..9: note = GFR-binding peptide
FYLISIANL

SEQ ID NO: 2429 - protein, 13 aa, synthetic construct
  REGION 1..13: note = GFR-binding peptide
FYLVSIANLKTPA

SEQ ID NO: 2430 - protein, 12 aa, synthetic construct
  REGION 1..12: note = GFR-binding peptide
YYLITLPELDQS

SEQ ID NO: 2431 - protein, 11 aa, synthetic construct
  REGION 1..11: note = GFR-binding peptide
IFLMSIPSLET

SEQ ID NO: 2432 - protein, 14 aa, synthetic construct
  REGION 1..14: note = GFR-binding peptide
  VARIANT 14: note = Xaa is C or S
FYLISIANLAQPVX

SEQ ID NO: 2433 - protein, 12 aa, synthetic construct
  REGION 1..12: note = GFR-binding peptide
YYVVPLPELQTP

SEQ ID NO: 2434 - protein, 10 aa, synthetic construct
  REGION 1..10: note = GFR-binding peptide
LYLVSIASLQ

SEQ ID NO: 2435 - protein, 14 aa, synthetic construct
  REGION 1..14: note = GFR-binding peptide
  VARIANT 14: note = Xaa is C or S
FYLVSIANLQTPAX

SEQ ID NO: 2436 - protein, 18 aa, synthetic construct
  REGION 1..18: note = GFR-binding peptide
  VARIANT 14..15: note = Xaa is C or S
YYLVTLPELKTPAXXPKP

SEQ ID NO: 2437 - protein, 15 aa, synthetic construct
  REGION 1..15: note = GFR-binding peptide
  VARIANT 14..15: note = Xaa is C or S
LYLMSIASLETPVXX

SEQ ID NO: 2438 - protein, 18 aa, synthetic construct
  REGION 1..18: note = GFR-binding peptide
  VARIANT 14..15: note = Xaa is C or S
YYVMPLPELETPVXXAKP

SEQ ID NO: 2439 - protein, 19 aa, synthetic construct
  REGION 1..19: note = GFR-binding peptide
  VARIANT 14..15: note = Xaa is C or S
FYLISIANLAQPVXXPAAS

SEQ ID NO: 2440 - protein, 18 aa, synthetic construct
  REGION 1..18: note = GFR-binding peptide
  VARIANT 14..15: note = Xaa is C or S
YYVIPLPELDQSVXXPSA

SEQ ID NO: 2441 - protein, 10 aa, synthetic construct
  REGION 1..10: note = GFR-binding peptide
IFLVSIPSLK

SEQ ID NO: 2442 - protein, 12 aa, synthetic construct
  REGION 1..12: note = GFR-binding peptide
FYLMSIANLETP

SEQ ID NO: 2443 - protein, 15 aa, synthetic construct
  REGION 1..15: note = GFR-binding peptide
  VARIANT 14: note = Xaa is C or S
FYLVSIANLKTPAXT

SEQ ID NO: 2444 - protein, 20 aa, synthetic construct
  REGION 1..20: note = GFR-binding peptide
  VARIANT 14: note = Xaa is C or S
FYLVSIANLKTPAXTPKTVH

SEQ ID NO: 2445 - protein, 17 aa, synthetic construct
  REGION 1..17: note = GFR-binding peptide
  VARIANT 14..15: note = Xaa is C or S
IFLISIPSLRTPVXXTP

SEQ ID NO: 2446 - protein, 10 aa, synthetic construct
  REGION 1..10: note = GFR-binding peptide
LYLISIASLR

SEQ ID NO: 2447 - protein, 10 aa, synthetic construct
  REGION 1..10: note = GFR-binding peptide
IFLMSIPSLE

SEQ ID NO: 2448 - protein, 13 aa, synthetic construct
  REGION 1..13: note = GFR-binding peptide
YYLITLPELAQPV

SEQ ID NO: 2449 - protein, 17 aa, synthetic construct
  REGION 1..17: note = GFR-binding peptide
  VARIANT 14..15: note = Xaa is C or S
YYVIPLPELRTPVXXTP

SEQ ID NO: 2450 - protein, 16 aa, synthetic construct
  REGION 1..16: note = GFR-binding peptide
  VARIANT 14..15: note = Xaa is C or S
FYLVSIANLKTPAXXP

SEQ ID NO: 2451 - protein, 13 aa, synthetic construct
  REGION 1..13: note = GFR-binding peptide
YYLVTLPELQTPA

SEQ ID NO: 2452 - protein, 18 aa, synthetic construct
  REGION 1..18: note = GFR-binding peptide
  VARIANT 14..15: note = Xaa is C or S
YYLITLPELRTPVXXTPP

SEQ ID NO: 2453 - protein, 12 aa, synthetic construct
  REGION 1..12: note = GFR-binding peptide
YYVIPLPELAQP

SEQ ID NO: 2454 - protein, 12 aa, synthetic construct
  REGION 1..12: note = GFR-binding peptide
FYLISIANLDQP

SEQ ID NO: 2455 - protein, 12 aa, synthetic construct
  REGION 1..12: note = GFR-binding peptide
YYLVTLPELQTP

SEQ ID NO: 2456 - protein, 18 aa, synthetic construct
  REGION 1..18: note = GFR-binding peptide
  VARIANT 14..15: note = Xaa is C or S
YYVVPLPELKTPAXXPKP

SEQ ID NO: 2457 - protein, 11 aa, synthetic construct
  REGION 1..11: note = GFR-binding peptide
LYLISIASLRT

SEQ ID NO: 2458 - protein, 14 aa, synthetic construct
  REGION 1..14: note = GFR-binding peptide
  VARIANT 14: note = Xaa is C or S
LYLVSIASLKTPAX

SEQ ID NO: 2459 - protein, 19 aa, synthetic construct
  REGION 1..19: note = GFR-binding peptide
  VARIANT 14..15: note = Xaa is C or S
LYLVSIASLKTPAXXPKPV

SEQ ID NO: 2460 - protein, 19 aa, synthetic construct
  REGION 1..19: note = GFR-binding peptide
  VARIANT 14..15: note = Xaa is C or S
FYLMSIANLETPVXXAKPI

SEQ ID NO: 2461 - protein, 17 aa, synthetic construct
  REGION 1..17: note = GFR-binding peptide
  VARIANT 14..15: note = Xaa is C or S
LYLISIASLDQPVXXPS

SEQ ID NO: 2462 - protein, 11 aa, synthetic construct
  REGION 1..11: note = GFR-binding peptide
IFLVSIPSLKT

SEQ ID NO: 2463 - protein, 19 aa, synthetic construct
  REGION 1..19: note = GFR-binding peptide
  VARIANT 14..15: note = Xaa is C or S
FYLISIANLDQPVXXPSAS

SEQ ID NO: 2464 - protein, 20 aa, synthetic construct
  REGION 1..20: note = GFR-binding peptide
  VARIANT 14..15: note = Xaa is C or S
FYLMSIANLETPVXXAKPIS

SEQ ID NO: 2465 - protein, 13 aa, synthetic construct
  REGION 1..13: note = GFR-binding peptide
YYLITLPELRTPV

SEQ ID NO: 2466 - protein, 11 aa, synthetic construct
  REGION 1..11: note = GFR-binding peptide
YYVMPLPELET

SEQ ID NO: 2467 - protein, 16 aa, synthetic construct
  REGION 1..16: note = GFR-binding peptide
  VARIANT 14..15: note = Xaa is C or S
FYLMSIANLETPVXXA

SEQ ID NO: 2468 - protein, 17 aa, synthetic construct
  REGION 1..17: note = GFR-binding peptide
  VARIANT 14..15: note = Xaa is C or S
IFLVSIPSLKTPAXXPK

SEQ ID NO: 2469 - protein, 15 aa, synthetic construct
  REGION 1..15: note = GFR-binding peptide
  VARIANT 14..15: note = Xaa is C or S
LYLISIASLDQPVXX

SEQ ID NO: 2470 - protein, 12 aa, synthetic construct
  REGION 1..12: note = GFR-binding peptide
YYVIPLPELRTP

SEQ ID NO: 2471 - protein, 10 aa, synthetic construct
  REGION 1..10: note = GFR-binding peptide
LYLISIASLD

SEQ ID NO: 2472 - protein, 9 aa, synthetic construct
  REGION 1..9: note = GFR-binding peptide
FYLMSIANL

SEQ ID NO: 2473 - protein, 16 aa, synthetic construct
  REGION 1..16: note = GFR-binding peptide
  VARIANT 14..15: note = Xaa is C or S
YYLITLPELAQPVXXP

SEQ ID NO: 2474 - protein, 9 aa, synthetic construct
  REGION 1..9: note = GFR-binding peptide
FYLVSIANL

SEQ ID NO: 2475 - protein, 13 aa, synthetic construct
  REGION 1..13: note = GFR-binding peptide
LYLMSIASLETPV

SEQ ID NO: 2476 - protein, 13 aa, synthetic construct
  REGION 1..13: note = GFR-binding peptide
YYVIPLPELAQPV

SEQ ID NO: 2477 - protein, 17 aa, synthetic construct
  REGION 1..17: note = GFR-binding peptide
  VARIANT 14..15: note = Xaa is C or S
LYLISIASLAQPVXXPA

SEQ ID NO: 2478 - protein, 16 aa, synthetic construct
  REGION 1..16: note = GFR-binding peptide
  VARIANT 14: note = Xaa is C or S
LYLVSIASLKTPAXTP

SEQ ID NO: 2479 - protein, 11 aa, synthetic construct
  REGION 1..11: note = GFR-binding peptide
YYVIPLPELDQ

SEQ ID NO: 2480 - protein, 14 aa, synthetic construct
  REGION 1..14: note = GFR-binding peptide
  VARIANT 14: note = Xaa is C or S
LYLISIASLDQSVX

SEQ ID NO: 2481 - protein, 9 aa, synthetic construct
  REGION 1..9: note = GFR-binding peptide
LYLVSIASL

SEQ ID NO: 2482 - protein, 16 aa, synthetic construct
  REGION 1..16: note = GFR-binding peptide
  VARIANT 14: note = Xaa is C or S
FYLVSIANLKTPAXTP

SEQ ID NO: 2483 - protein, 19 aa, synthetic construct
  REGION 1..19: note = GFR-binding peptide
  VARIANT 14..15: note = Xaa is C or S
YYLITLPELDQSVXXPSAS

SEQ ID NO: 2484 - protein, 18 aa, synthetic construct
  REGION 1..18: note = GFR-binding peptide
  VARIANT 14..15: note = Xaa is C or S
YYLMTLPELETPVXXAKP

SEQ ID NO: 2485 - protein, 11 aa, synthetic construct
  REGION 1..11: note = GFR-binding peptide
LYLISIASLAQ

SEQ ID NO: 2486 - protein, 19 aa, synthetic construct
  REGION 1..19: note = GFR-binding peptide
  VARIANT 14..15: note = Xaa is C or S
FYLVSIANLQTPAXXPKPV

SEQ ID NO: 2487 - protein, 18 aa, synthetic construct
  REGION 1..18: note = GFR-binding peptide
  VARIANT 14..15: note = Xaa is C or S
YYLITLPELDQPVXXPSA

SEQ ID NO: 2488 - protein, 17 aa, synthetic construct
  REGION 1..17: note = GFR-binding peptide
  VARIANT 14..15: note = Xaa is C or S
IFLMSIPSLETPVXXAK

SEQ ID NO: 2489 - protein, 10 aa, synthetic construct
  REGION 1..10: note = GFR-binding peptide
YYLMTLPELE

SEQ ID NO: 2490 - protein, 17 aa, synthetic construct
  REGION 1..17: note = GFR-binding peptide
  VARIANT 14..15: note = Xaa is C or S
IFLISIPSLAQPVXXPA

SEQ ID NO: 2491 - protein, 17 aa, synthetic construct
  REGION 1..17: note = GFR-binding peptide
  VARIANT 14..15: note = Xaa is C or S
LYLMSIASLETPVXXAK

SEQ ID NO: 2492 - protein, 16 aa, synthetic construct
  REGION 1..16: note = GFR-binding peptide
  VARIANT 14..15: note = Xaa is C or S
LYLISIASLDQPVXXP

SEQ ID NO: 2493 - protein, 12 aa, synthetic construct
  REGION 1..12: note = GFR-binding peptide
IFLISIPSLRTP

SEQ ID NO: 2494 - protein, 11 aa, synthetic construct
  REGION 1..11: note = GFR-binding peptide
FYLVSIANLQT

SEQ ID NO: 2495 - protein, 20 aa, synthetic construct
  REGION 1..20: note = GFR-binding peptide
  VARIANT 14..15: note = Xaa is C or S
LYLISIASLDQSVXXPSASA

SEQ ID NO: 2496 - protein, 19 aa, synthetic construct
  REGION 1..19: note = GFR-binding peptide
  VARIANT 14..15: note = Xaa is C or S
FYLVSIANLKTPAXXPKPV

SEQ ID NO: 2497 - protein, 20 aa, synthetic construct
  REGION 1..20: note = GFR-binding peptide
  VARIANT 14..15: note = Xaa is C or S
FYLVSIANLQTPAXXPKPVT

SEQ ID NO: 2498 - protein, 18 aa, synthetic construct
  REGION 1..18: note = GFR-binding peptide
  VARIANT 14..15: note = Xaa is C or S
FYLISIANLAQPVXXPAA

SEQ ID NO: 2499 - protein, 17 aa, synthetic construct
  REGION 1..17: note = GFR-binding peptide
  VARIANT 14..15: note = Xaa is C or S
YYVVPLPELKTPAXXPK

SEQ ID NO: 2500 - protein, 15 aa, synthetic construct
  REGION 1..15: note = GFR-binding peptide
  VARIANT 14..15: note = Xaa is C or S
FYLISIANLDQSVXX

SEQ ID NO: 2501 - protein, 12 aa, synthetic construct
  REGION 1..12: note = GFR-binding peptide
YYVIPLPELDQS

SEQ ID NO: 2502 - protein, 14 aa, synthetic construct
  REGION 1..14: note = GFR-binding peptide
  VARIANT 14: note = Xaa is C or S
FYLISIANLRTPVX

SEQ ID NO: 2503 - protein, 17 aa, synthetic construct
  REGION 1..17: note = GFR-binding peptide
  VARIANT 14: note = Xaa is C or S
FYLVSIANLKTPAXTPK

SEQ ID NO: 2504 - protein, 14 aa, synthetic construct
  REGION 1..14: note = GFR-binding peptide
  VARIANT 14: note = Xaa is C or S
LYLISIASLRTPVX

SEQ ID NO: 2505 - protein, 12 aa, synthetic construct
  REGION 1..12: note = GFR-binding peptide
YYLITLPELRTP

SEQ ID NO: 2506 - protein, 13 aa, synthetic construct
  REGION 1..13: note = GFR-binding peptide
YYLITLPELDQSV

SEQ ID NO: 2507 - protein, 11 aa, synthetic construct
  REGION 1..11: note = GFR-binding peptide
YYLMTLPELET

SEQ ID NO: 2508 - protein, 8 aa, synthetic construct
  REGION 1..8: note = GFR-binding peptide
IFLISIPS

SEQ ID NO: 2509 - protein, 16 aa, synthetic construct
  REGION 1..16: note = GFR-binding peptide
  VARIANT 14..15: note = Xaa is C or S
LYLVSIASLKTPAXXP

SEQ ID NO: 2510 - protein, 19 aa, synthetic construct
  REGION 1..19: note = GFR-binding peptide
  VARIANT 14..15: note = Xaa is C or S
YYLITLPELRTPVXXTPPT

SEQ ID NO: 2511 - protein, 11 aa, synthetic construct
  REGION 1..11: note = GFR-binding peptide
FYLISIANLAQ

SEQ ID NO: 2512 - protein, 20 aa, synthetic construct
  REGION 1..20: note = GFR-binding peptide
  VARIANT 14..15: note = Xaa is C or S
FYLISIANLDQSVXXPSASA

SEQ ID NO: 2513 - protein, 15 aa, synthetic construct
  REGION 1..15: note = GFR-binding peptide
  VARIANT 14..15: note = Xaa is C or S
YYVIPLPELAQPVXX

SEQ ID NO: 2514 - protein, 11 aa, synthetic construct
  REGION 1..11: note = GFR-binding peptide
LYLVSIASLQT

SEQ ID NO: 2515 - protein, 13 aa, synthetic construct
  REGION 1..13: note = GFR-binding peptide
FYLISIANLDQSV

SEQ ID NO: 2516 - protein, 14 aa, synthetic construct
  REGION 1..14: note = GFR-binding peptide
  VARIANT 14: note = Xaa is C or S
LYLVSIASLQTPAX

SEQ ID NO: 2517 - protein, 11 aa, synthetic construct
  REGION 1..11: note = GFR-binding peptide
LYLISIASLDQ

SEQ ID NO: 2518 - protein, 11 aa, synthetic construct
  REGION 1..11: note = GFR-binding peptide
IFLISIPSLDQ

SEQ ID NO: 2519 - protein, 18 aa, synthetic construct
  REGION 1..18: note = GFR-binding peptide
  VARIANT 14..15: note = Xaa is C or S
IFLMSIPSLETPVXXAKP

SEQ ID NO: 2520 - protein, 10 aa, synthetic construct
  REGION 1..10: note = GFR-binding peptide
YYVIPLPELA

SEQ ID NO: 2521 - protein, 18 aa, synthetic construct
  REGION 1..18: note = GFR-binding peptide
  VARIANT 14..15: note = Xaa is C or S
FYLISIANLDQPVXXPSA

SEQ ID NO: 2522 - protein, 16 aa, synthetic construct
  REGION 1..16: note = GFR-binding peptide
  VARIANT 14..15: note = Xaa is C or S
FYLISIANLDQPVXXP

SEQ ID NO: 2523 - protein, 17 aa, synthetic construct
  REGION 1..17: note = GFR-binding peptide
  VARIANT 14..15: note = Xaa is C or S
YYVMPLPELETPVXXAK

SEQ ID NO: 2524 - protein, 18 aa, synthetic construct
  REGION 1..18: note = GFR-binding peptide
  VARIANT 14..15: note = Xaa is C or S
FYLISIANLRTPVXXTPP

SEQ ID NO: 2525 - protein, 11 aa, synthetic construct
  REGION 1..11: note = GFR-binding peptide
YYLVTLPELKT

SEQ ID NO: 2526 - protein, 15 aa, synthetic construct
  REGION 1..15: note = GFR-binding peptide
  VARIANT 14..15: note = Xaa is C or S
YYVVPLPELQTPAXX

SEQ ID NO: 2527 - protein, 17 aa, synthetic construct
  REGION 1..17: note = GFR-binding peptide
  VARIANT 14..15: note = Xaa is C or S
YYLVTLPELKTPAXXPK

SEQ ID NO: 2528 - protein, 10 aa, synthetic construct
  REGION 1..10: note = GFR-binding peptide
FYLVSIANLQ

SEQ ID NO: 2529 - protein, 15 aa, synthetic construct
  REGION 1..15: note = GFR-binding peptide
  VARIANT 14..15: note = Xaa is C or S
YYLITLPELDQSVXX

SEQ ID NO: 2530 - protein, 19 aa, synthetic construct
  REGION 1..19: note = GFR-binding peptide
  VARIANT 14..15: note = Xaa is C or S
IFLISIPSLDQSVXXPSAS

SEQ ID NO: 2531 - protein, 10 aa, synthetic construct
  REGION 1..10: note = GFR-binding peptide
IFLVSIPSLQ

SEQ ID NO: 2532 - protein, 14 aa, synthetic construct
  REGION 1..14: note = GFR-binding peptide
  VARIANT 14: note = Xaa is C or S
YYVIPLPELDQPVX

SEQ ID NO: 2533 - protein, 19 aa, synthetic construct
  REGION 1..19: note = GFR-binding peptide
  VARIANT 14..15: note = Xaa is C or S
FYLISIANLDQSVXXPSAS

SEQ ID NO: 2534 - protein, 13 aa, synthetic construct
  REGION 1..13: note = GFR-binding peptide
IFLISIPSLRTPV

SEQ ID NO: 2535 - protein, 18 aa, synthetic construct
  REGION 1..18: note = GFR-binding peptide
  VARIANT 14..15: note = Xaa is C or S
YYLVTLPELQTPAXXPKP

SEQ ID NO: 2536 - protein, 15 aa, synthetic construct
  REGION 1..15: note = GFR-binding peptide
  VARIANT 14..15: note = Xaa is C or S
IFLMSIPSLETPVXX

SEQ ID NO: 2537 - protein, 20 aa, synthetic construct
  REGION 1..20: note = GFR-binding peptide
  VARIANT 14..15: note = Xaa is C or S
YYVVPLPELQTPAXXPKPVT

SEQ ID NO: 2538 - protein, 16 aa, synthetic construct
  REGION 1..16: note = GFR-binding peptide
  VARIANT 14..15: note = Xaa is C or S
YYVVPLPELQTPAXXP

SEQ ID NO: 2539 - protein, 20 aa, synthetic construct
  REGION 1..20: note = GFR-binding peptide
  VARIANT 14..15: note = Xaa is C or S
LYLVSIASLKTPAXXPKPVY

SEQ ID NO: 2540 - protein, 16 aa, synthetic construct
  REGION 1..16: note = GFR-binding peptide
  VARIANT 14..15: note = Xaa is C or S
FYLISIANLAQPVXXP

SEQ ID NO: 2541 - protein, 10 aa, synthetic construct
  REGION 1..10: note = GFR-binding peptide
LYLVSIASLK

SEQ ID NO: 2542 - protein, 20 aa, synthetic construct
  REGION 1..20: note = GFR-binding peptide
  VARIANT 14..15: note = Xaa is C or S
LYLMSIASLETPVXXAKPIS

SEQ ID NO: 2543 - protein, 9 aa, synthetic construct
  REGION 1..9: note = GFR-binding peptide
LYLMSIASL

SEQ ID NO: 2544 - protein, 17 aa, synthetic construct
  REGION 1..17: note = GFR-binding peptide
  VARIANT 14..15: note = Xaa is C or S
LYLISIASLRTPVXXTP

SEQ ID NO: 2545 - protein, 19 aa, synthetic construct
  REGION 1..19: note = GFR-binding peptide
  VARIANT 14..15: note = Xaa is C or S
FYLISIANLRTPVXXTPPT

SEQ ID NO: 2546 - protein, 15 aa, synthetic construct
  REGION 1..15: note = GFR-binding peptide
  VARIANT 14..15: note = Xaa is C or S
LYLISIASLDQSVXX

SEQ ID NO: 2547 - protein, 18 aa, synthetic construct
  REGION 1..18: note = GFR-binding peptide
  VARIANT 14..15: note = Xaa is C or S
YYLITLPELAQPVXXPAA

SEQ ID NO: 2548 - protein, 11 aa, synthetic construct
  REGION 1..11: note = GFR-binding peptide
YYVVPLPELKT

SEQ ID NO: 2549 - protein, 11 aa, synthetic construct
  REGION 1..11: note = GFR-binding peptide
YYLITLPELDQ

SEQ ID NO: 2550 - protein, 10 aa, synthetic construct
  REGION 1..10: note = GFR-binding peptide
LYLMSIASLE

SEQ ID NO: 2551 - protein, 20 aa, synthetic construct
  REGION 1..20: note = GFR-binding peptide
  VARIANT 14..15: note = Xaa is C or S
IFLISIPSLRTPVXXTPPTS

SEQ ID NO: 2552 - protein, 19 aa, synthetic construct
  REGION 1..19: note = GFR-binding peptide
  VARIANT 14..15: note = Xaa is C or S
YYVVPLPELQTPAXXPKPV

SEQ ID NO: 2553 - protein, 20 aa, synthetic construct
  REGION 1..20: note = GFR-binding peptide
  VARIANT 14..15: note = Xaa is C or S
FYLISIANLRTPVXXTPPTS

SEQ ID NO: 2554 - protein, 15 aa, synthetic construct
  REGION 1..15: note = GFR-binding peptide
  VARIANT 14..15: note = Xaa is C or S
YYLVTLPELQTPAXX

SEQ ID NO: 2555 - protein, 19 aa, synthetic construct
  REGION 1..19: note = GFR-binding peptide
  VARIANT 14..15: note = Xaa is C or S
LYLMSIASLETPVXXAKPI

SEQ ID NO: 2556 - protein, 11 aa, synthetic construct
  REGION 1..11: note = GFR-binding peptide
IFLISIPSLRT

SEQ ID NO: 2557 - protein, 13 aa, synthetic construct
  REGION 1..13: note = GFR-binding peptide
FYLISIANLRTPV

SEQ ID NO: 2558 - protein, 8 aa, synthetic construct
  REGION 1..8: note = GFR-binding peptide
YYLITLPE

SEQ ID NO: 2559 - protein, 9 aa, synthetic construct
  REGION 1..9: note = GFR-binding peptide
YYVIPLPEL

SEQ ID NO: 2560 - protein, 17 aa, synthetic construct
  REGION 1..17: note = GFR-binding peptide
  VARIANT 14..15: note = Xaa is C or S
IFLISIPSLDQPVXXPS

SEQ ID NO: 2561 - protein, 20 aa, synthetic construct
  REGION 1..20: note = GFR-binding peptide
  VARIANT 14..15: note = Xaa is C or S
YYVIPLPELAQPVXXPAASA

SEQ ID NO: 2562 - protein, 19 aa, synthetic construct
  REGION 1..19: note = GFR-binding peptide
  VARIANT 14..15: note = Xaa is C or S
LYLISIASLAQPVXXPAAS

SEQ ID NO: 2563 - protein, 15 aa, synthetic construct
  REGION 1..15: note = GFR-binding peptide
  VARIANT 14..15: note = Xaa is C or S
FYLMSIANLETPVXX

SEQ ID NO: 2564 - protein, 14 aa, synthetic construct
  REGION 1..14: note = GFR-binding peptide
  VARIANT 14: note = Xaa is C or S
YYLITLPELDQPVX

SEQ ID NO: 2565 - protein, 20 aa, synthetic construct
  REGION 1..20: note = GFR-binding peptide
  VARIANT 14..15: note = Xaa is C or S
LYLISIASLDQPVXXPSASA

SEQ ID NO: 2566 - protein, 16 aa, synthetic construct
  REGION 1..16: note = GFR-binding peptide
  VARIANT 14..15: note = Xaa is C or S
IFLISIPSLAQPVXXP

SEQ ID NO: 2567 - protein, 12 aa, synthetic construct
  REGION 1..12: note = GFR-binding peptide
YYLITLPELDQP

SEQ ID NO: 2568 - protein, 18 aa, synthetic construct
  REGION 1..18: note = GFR-binding peptide
  VARIANT 14..15: note = Xaa is C or S
YYVIPLPELDQPVXXPSA

SEQ ID NO: 2569 - protein, 19 aa, synthetic construct
  REGION 1..19: note = GFR-binding peptide
  VARIANT 14..15: note = Xaa is C or S
IFLISIPSLRTPVXXTPPT

SEQ ID NO: 2570 - protein, 15 aa, synthetic construct
  REGION 1..15: note = GFR-binding peptide
  VARIANT 14: note = Xaa is C or S
LYLVSIASLKTPAXT

SEQ ID NO: 2571 - protein, 17 aa, synthetic construct
  REGION 1..17: note = GFR-binding peptide
  VARIANT 14..15: note = Xaa is C or S
YYVIPLPELAQPVXXPA

SEQ ID NO: 2572 - protein, 12 aa, synthetic construct
  REGION 1..12: note = GFR-binding peptide
LYLVSIASLKTP

SEQ ID NO: 2573 - protein, 12 aa, synthetic construct
  REGION 1..12: note = GFR-binding peptide
IFLVSIPSLQTP

SEQ ID NO: 2574 - protein, 15 aa, synthetic construct
  REGION 1..15: note = GFR-binding peptide
  VARIANT 14..15: note = Xaa is C or S
LYLISIASLRTPVXX

SEQ ID NO: 2575 - protein, 12 aa, synthetic construct
  REGION 1..12: note = GFR-binding peptide
IFLVSIPSLKTP

SEQ ID NO: 2576 - protein, 12 aa, synthetic construct
  REGION 1..12: note = GFR-binding peptide
FYLVSIANLQTP

SEQ ID NO: 2577 - protein, 13 aa, synthetic construct
  REGION 1..13: note = GFR-binding peptide
FYLMSIANLETPV

SEQ ID NO: 2578 - protein, 12 aa, synthetic construct
  REGION 1..12: note = GFR-binding peptide
YYLITLPELAQP

SEQ ID NO: 2579 - protein, 19 aa, synthetic construct
  REGION 1..19: note = GFR-binding peptide
  VARIANT 14..15: note = Xaa is C or S
YYLITLPELDQPVXXPSAS

SEQ ID NO: 2580 - protein, 18 aa, synthetic construct
  REGION 1..18: note = GFR-binding peptide
  VARIANT 14..15: note = Xaa is C or S
YYLITLPELDQSVXXPSA

SEQ ID NO: 2581 - protein, 15 aa, synthetic construct
  REGION 1..15: note = GFR-binding peptide
  VARIANT 14..15: note = Xaa is C or S
IFLISIPSLRTPVXX

SEQ ID NO: 2582 - protein, 14 aa, synthetic construct
  REGION 1..14: note = GFR-binding peptide
  VARIANT 14: note = Xaa is C or S
YYVIPLPELAQPVX

SEQ ID NO: 2583 - protein, 15 aa, synthetic construct
  REGION 1..15: note = GFR-binding peptide
  VARIANT 14..15: note = Xaa is C or S
FYLISIANLRTPVXX

SEQ ID NO: 2584 - protein, 18 aa, synthetic construct
  REGION 1..18: note = GFR-binding peptide
  VARIANT 14: note = Xaa is C or S
YYVVPLPELKTPAXTPKT

SEQ ID NO: 2585 - protein, 11 aa, synthetic construct
  REGION 1..11: note = GFR-binding peptide
FYLISIANLRT

SEQ ID NO: 2586 - protein, 9 aa, synthetic construct
  REGION 1..9: note = GFR-binding peptide
YYLITLPEL

SEQ ID NO: 2587 - protein, 15 aa, synthetic construct
  REGION 1..15: note = GFR-binding peptide
  VARIANT 14..15: note = Xaa is C or S
YYLITLPELAQPVXX

SEQ ID NO: 2588 - protein, 13 aa, synthetic construct
  REGION 1..13: note = GFR-binding peptide
YYLVTLPELKTPA

SEQ ID NO: 2589 - protein, 20 aa, synthetic construct
  REGION 1..20: note = GFR-binding peptide
  VARIANT 14..15: note = Xaa is C or S
YYVMPLPELETPVXXAKPIK

SEQ ID NO: 2590 - protein, 10 aa, synthetic construct
  REGION 1..10: note = GFR-binding peptide
YYLITLPELA

SEQ ID NO: 2591 - protein, 14 aa, synthetic construct
  REGION 1..14: note = GFR-binding peptide
  VARIANT 14: note = Xaa is C or S
YYLITLPELAQPVX

SEQ ID NO: 2592 - protein, 16 aa, synthetic construct
  REGION 1..16: note = GFR-binding peptide
  VARIANT 14..15: note = Xaa is C or S
FYLISIANLDQSVXXP

SEQ ID NO: 2593 - protein, 17 aa, synthetic construct
  REGION 1..17: note = GFR-binding peptide
  VARIANT 14..15: note = Xaa is C or S
IFLISIPSLDQSVXXPS

SEQ ID NO: 2594 - protein, 14 aa, synthetic construct
  REGION 1..14: note = GFR-binding peptide
  VARIANT 14: note = Xaa is C or S
FYLMSIANLETPVX

SEQ ID NO: 2595 - protein, 17 aa, synthetic construct
  REGION 1..17: note = GFR-binding peptide
  VARIANT 14..15: note = Xaa is C or S
LYLISIASLDQSVXXPS

SEQ ID NO: 2596 - protein, 20 aa, synthetic construct
  REGION 1..20: note = GFR-binding peptide
  VARIANT 14..15: note = Xaa is C or S
FYLISIANLDQPVXXPSASA

SEQ ID NO: 2597 - protein, 12 aa, synthetic construct
  REGION 1..12: note = GFR-binding peptide
LYLVSIASLQTP

SEQ ID NO: 2598 - protein, 15 aa, synthetic construct
  REGION 1..15: note = GFR-binding peptide
  VARIANT 14..15: note = Xaa is C or S
YYLVTLPELKTPAXX

SEQ ID NO: 2599 - protein, 20 aa, synthetic construct
  REGION 1..20: note = GFR-binding peptide
  VARIANT 14: note = Xaa is C or S
YYLVTLPELKTPAXTPKTVH

SEQ ID NO: 2600 - protein, 12 aa, synthetic construct
  REGION 1..12: note = GFR-binding peptide
YYVIPLPELDQP

SEQ ID NO: 2601 - protein, 14 aa, synthetic construct
  REGION 1..14: note = GFR-binding peptide
  VARIANT 14: note = Xaa is C or S
YYVVPLPELKTPAX

SEQ ID NO: 2602 - protein, 13 aa, synthetic construct
  REGION 1..13: note = GFR-binding peptide
YYLITLPELDQPV

SEQ ID NO: 2603 - protein, 16 aa, synthetic construct
  REGION 1..16: note = GFR-binding peptide
  VARIANT 14..15: note = Xaa is C or S
YYVIPLPELRTPVXXT

SEQ ID NO: 2604 - protein, 18 aa, synthetic construct
  REGION 1..18: note = GFR-binding peptide
  VARIANT 14..15: note = Xaa is C or S
YYVVPLPELQTPAXXPKP

SEQ ID NO: 2605 - protein, 16 aa, synthetic construct
  REGION 1..16: note = GFR-binding peptide
  VARIANT 14..15: note = Xaa is C or S
YYLVTLPELQTPAXXP

SEQ ID NO: 2606 - protein, 17 aa, synthetic construct
  REGION 1..17: note = GFR-binding peptide
  VARIANT 14..15: note = Xaa is C or S
FYLISIANLRTPVXXTP

SEQ ID NO: 2607 - protein, 16 aa, synthetic construct
  REGION 1..16: note = GFR-binding peptide
  VARIANT 14..15: note = Xaa is C or S
LYLISIASLDQSVXXP

SEQ ID NO: 2608 - protein, 19 aa, synthetic construct
  REGION 1..19: note = GFR-binding peptide
  VARIANT 14: note = Xaa is C or S
YYVVPLPELKTPAXTPKTV

SEQ ID NO: 2609 - protein, 13 aa, synthetic construct
  REGION 1..13: note = GFR-binding peptide
YYVVPLPELQTPA

SEQ ID NO: 2610 - protein, 16 aa, synthetic construct
  REGION 1..16: note = GFR-binding peptide
  VARIANT 14..15: note = Xaa is C or S
IFLISIPSLDQSVXXP

SEQ ID NO: 2611 - protein, 16 aa, synthetic construct
  REGION 1..16: note = GFR-binding peptide
  VARIANT 14..15: note = Xaa is C or S
YYVMPLPELETPVXXA

SEQ ID NO: 2612 - protein, 12 aa, synthetic construct
  REGION 1..12: note = GFR-binding peptide
IFLMSIPSLETP

SEQ ID NO: 2613 - protein, 18 aa, synthetic construct
  REGION 1..18: note = GFR-binding peptide
  VARIANT 14..15: note = Xaa is C or S
IFLISIPSLRTPVXXTPP

SEQ ID NO: 2614 - protein, 18 aa, synthetic construct
  REGION 1..18: note = GFR-binding peptide
  VARIANT 14..15: note = Xaa is C or S
LYLISIASLRTPVXXTPP

SEQ ID NO: 2615 - protein, 12 aa, synthetic construct
  REGION 1..12: note = GFR-binding peptide
FYLVSIANLKTP

SEQ ID NO: 2616 - protein, 14 aa, synthetic construct
  REGION 1..14: note = GFR-binding peptide
  VARIANT 14: note = Xaa is C or S
IFLMSIPSLETPVX

SEQ ID NO: 2617 - protein, 17 aa, synthetic construct
  REGION 1..17: note = GFR-binding peptide
  VARIANT 14..15: note = Xaa is C or S
FYLISIANLDQSVXXPS

SEQ ID NO: 2618 - protein, 12 aa, synthetic construct
  REGION 1..12: note = GFR-binding peptide
LYLMSIASLETP

SEQ ID NO: 2619 - protein, 14 aa, synthetic construct
  REGION 1..14: note = GFR-binding peptide
  VARIANT 14: note = Xaa is C or S
LYLMSIASLETPVX

SEQ ID NO: 2620 - protein, 13 aa, synthetic construct
  REGION 1..13: note = GFR-binding peptide
TQVQLRSVKVAKV

SEQ ID NO: 2621 - protein, 13 aa, synthetic construct
  REGION 1..13: note = GFR-binding peptide
VPTGQRPVQMRKI

SEQ ID NO: 2622 - protein, 18 aa, synthetic construct
  REGION 1..18: note = GFR-binding peptide
  VARIANT 3: note = Xaa is C or S
VQXRPTQVQLSNITVQIM

SEQ ID NO: 2623 - protein, 11 aa, synthetic construct
  REGION 1..11: note = GFR-binding peptide
TEERPVQMRKI

SEQ ID NO: 2624 - protein, 14 aa, synthetic construct
  REGION 1..14: note = GFR-binding peptide
PSRVHHRPVQVRKI

SEQ ID NO: 2625 - protein, 12 aa, synthetic construct
  REGION 1..12: note = GFR-binding peptide
RVHHSNITVQIM

SEQ ID NO: 2626 - protein, 19 aa, synthetic construct
  REGION 1..19: note = GFR-binding peptide
  VARIANT 6: note = Xaa is C or S
DEGLEXVPTGQRPVQMRKI

SEQ ID NO: 2627 - protein, 14 aa, synthetic construct
  REGION 1..14: note = GFR-binding peptide
  VARIANT 1: note = Xaa is C or S
XVPTEERSVKMAKV

SEQ ID NO: 2628 - protein, 10 aa, synthetic construct
  REGION 1..10: note = GFR-binding peptide
QLSNITVQIM

SEQ ID NO: 2629 - protein, 15 aa, synthetic construct
  REGION 1..15: note = GFR-binding peptide
RPTQVQLSNITVQIM

SEQ ID NO: 2630 - protein, 15 aa, synthetic construct
  REGION 1..15: note = GFR-binding peptide
RPTQVQLRSVKVAKV

SEQ ID NO: 2631 - protein, 9 aa, synthetic construct
  REGION 1..9: note = GFR-binding peptide
QRPVQMRKI

SEQ ID NO: 2632 - protein, 20 aa, synthetic construct
  REGION 1..20: note = GFR-binding peptide
  VARIANT 5: note = Xaa is C or S
RNVQXRPTQVQLSNITVQIM

SEQ ID NO: 2633 - protein, 15 aa, synthetic construct
  REGION 1..15: note = GFR-binding peptide
QPSRVHHRPVQVRKI

SEQ ID NO: 2634 - protein, 14 aa, synthetic construct
  REGION 1..14: note = GFR-binding peptide
  VARIANT 1: note = Xaa is C or S
XVPTGQRPVQMRKI

SEQ ID NO: 2635 - protein, 16 aa, synthetic construct
  REGION 1..16: note = GFR-binding peptide
  VARIANT 3: note = Xaa is C or S
LEXVPTGQRSVKMAKV

SEQ ID NO: 2636 - protein, 19 aa, synthetic construct
  REGION 1..19: note = GFR-binding peptide
  VARIANT 4: note = Xaa is C or S
SVKXQPSRVHHRPVQVRKI

SEQ ID NO: 2637 - protein, 11 aa, synthetic construct
  REGION 1..11: note = GFR-binding peptide
TGQRSVKMAKV

SEQ ID NO: 2638 - protein, 17 aa, synthetic construct
  REGION 1..17: note = GFR-binding peptide
  VARIANT 4: note = Xaa is C or S
GLEXVPTEERPVQMRKI

SEQ ID NO: 2639 - protein, 13 aa, synthetic construct
  REGION 1..13: note = GFR-binding peptide
TQVQLSNITVQIM

SEQ ID NO: 2640 - protein, 19 aa, synthetic construct
  REGION 1..19: note = GFR-binding peptide
  VARIANT 6: note = Xaa is C or S
DEGLEXVPTEERSVKMAKV

SEQ ID NO: 2641 - protein, 13 aa, synthetic construct
  REGION 1..13: note = GFR-binding peptide
VPTEERSVKMAKV

SEQ ID NO: 2642 - protein, 11 aa, synthetic construct
  REGION 1..11: note = GFR-binding peptide
VQLSNITVQIM

SEQ ID NO: 2643 - protein, 20 aa, synthetic construct
  REGION 1..20: note = GFR-binding peptide
  VARIANT 7: note = Xaa is C or S
NDEGLEXVPTEERSVKMAKV

SEQ ID NO: 2644 - protein, 16 aa, synthetic construct
  REGION 1..16: note = GFR-binding peptide
  VARIANT 3: note = Xaa is C or S
LEXVPTEERPVQMRKI

SEQ ID NO: 2645 - protein, 18 aa, synthetic construct
  REGION 1..18: note = GFR-binding peptide
  VARIANT 3: note = Xaa is C or S
VQXRPTQVQLRSVKVAKV

SEQ ID NO: 2646 - protein, 17 aa, synthetic construct
  REGION 1..17: note = GFR-binding peptide
  VARIANT 2: note = Xaa is C or S
KXQPSRVHHSNITVQIM

SEQ ID NO: 2647 - protein, 16 aa, synthetic construct
  REGION 1..16: note = GFR-binding peptide
  VARIANT 1: note = Xaa is C or S
XRPTQVQLSNITVQIM

SEQ ID NO: 2648 - protein, 14 aa, synthetic construct
  REGION 1..14: note = GFR-binding peptide
PSRVHHSNITVQIM

SEQ ID NO: 2649 - protein, 12 aa, synthetic construct
  REGION 1..12: note = GFR-binding peptide
RVHHRPVQVRKI

SEQ ID NO: 2650 - protein, 10 aa, synthetic construct
  REGION 1..10: note = GFR-binding peptide
HHRPVQVRKI

SEQ ID NO: 2651 - protein, 15 aa, synthetic construct
  REGION 1..15: note = GFR-binding peptide
  VARIANT 2: note = Xaa is C or S
EXVPTGQRSVKMAKV

SEQ ID NO: 2652 - protein, 10 aa, synthetic construct
  REGION 1..10: note = GFR-binding peptide
GQRSVKMAKV

SEQ ID NO: 2653 - protein, 12 aa, synthetic construct
  REGION 1..12: note = GFR-binding peptide
PTEERPVQMRKI

SEQ ID NO: 2654 - protein, 15 aa, synthetic construct
  REGION 1..15: note = GFR-binding peptide
  VARIANT 2: note = Xaa is C or S
EXVPTEERSVKMAKV

SEQ ID NO: 2655 - protein, 10 aa, synthetic construct
  REGION 1..10: note = GFR-binding peptide
EERSVKMAKV

SEQ ID NO: 2656 - protein, 14 aa, synthetic construct
  REGION 1..14: note = GFR-binding peptide
  VARIANT 1: note = Xaa is C or S
XVPTEERPVQMRKI

SEQ ID NO: 2657 - protein, 19 aa, synthetic construct
  REGION 1..19: note = GFR-binding peptide
  VARIANT 6: note = Xaa is C or S
DEGLEXVPTGQRSVKMAKV

SEQ ID NO: 2658 - protein, 13 aa, synthetic construct
  REGION 1..13: note = GFR-binding peptide
SRVHHSNITVQIM

SEQ ID NO: 2659 - protein, 15 aa, synthetic construct
  REGION 1..15: note = GFR-binding peptide
QPSRVHHSNITVQIM

SEQ ID NO: 2660 - protein, 12 aa, synthetic construct
  REGION 1..12: note = GFR-binding peptide
QVQLRSVKVAKV

SEQ ID NO: 2661 - protein, 9 aa, synthetic construct
  REGION 1..9: note = GFR-binding peptide
QRSVKMAKV

SEQ ID NO: 2662 - protein, 9 aa, synthetic construct
  REGION 1..9: note = GFR-binding peptide
LRSVKVAKV

SEQ ID NO: 2663 - protein, 10 aa, synthetic construct
  REGION 1..10: note = GFR-binding peptide
QLRSVKVAKV

SEQ ID NO: 2664 - protein, 20 aa, synthetic construct
  REGION 1..20: note = GFR-binding peptide
  VARIANT 5: note = Xaa is C or S
SSVKXQPSRVHHSNITVQIM

SEQ ID NO: 2665 - protein, 19 aa, synthetic construct
  REGION 1..19: note = GFR-binding peptide
  VARIANT 4: note = Xaa is C or S
NVQXRPTQVQLRSVKVAKV

SEQ ID NO: 2666 - protein, 14 aa, synthetic construct
  REGION 1..14: note = GFR-binding peptide
  VARIANT 1: note = Xaa is C or S
XVPTGQRSVKMAKV

SEQ ID NO: 2667 - protein, 19 aa, synthetic construct
  REGION 1..19: note = GFR-binding peptide
  VARIANT 6: note = Xaa is C or S
DEGLEXVPTEERPVQMRKI

SEQ ID NO: 2668 - protein, 11 aa, synthetic construct
  REGION 1..11: note = GFR-binding peptide
VHHSNITVQIM

SEQ ID NO: 2669 - protein, 11 aa, synthetic construct
  REGION 1..11: note = GFR-binding peptide
TGQRPVQMRKI

SEQ ID NO: 2670 - protein, 16 aa, synthetic construct
  REGION 1..16: note = GFR-binding peptide
  VARIANT 3: note = Xaa is C or S
LEXVPTGQRPVQMRKI

SEQ ID NO: 2671 - protein, 13 aa, synthetic construct
  REGION 1..13: note = GFR-binding peptide
VPTEERPVQMRKI

SEQ ID NO: 2672 - protein, 18 aa, synthetic construct
  REGION 1..18: note = GFR-binding peptide
  VARIANT 3: note = Xaa is C or S
VKXQPSRVHHSNITVQIM

SEQ ID NO: 2673 - protein, 14 aa, synthetic construct
  REGION 1..14: note = GFR-binding peptide
PTQVQLSNITVQIM

SEQ ID NO: 2674 - protein, 10 aa, synthetic construct
  REGION 1..10: note = GFR-binding peptide
HHSNITVQIM

SEQ ID NO: 2675 - protein, 13 aa, synthetic construct
  REGION 1..13: note = GFR-binding peptide
VPTGQRSVKMAKV

SEQ ID NO: 2676 - protein, 18 aa, synthetic construct
  REGION 1..18: note = GFR-binding peptide
  VARIANT 5: note = Xaa is C or S
EGLEXVPTGQRSVKMAKV

SEQ ID NO: 2677 - protein, 16 aa, synthetic construct
  REGION 1..16: note = GFR-binding peptide
  VARIANT 1: note = Xaa is C or S
XRPTQVQLRSVKVAKV

SEQ ID NO: 2678 - protein, 14 aa, synthetic construct
  REGION 1..14: note = GFR-binding peptide
PTQVQLRSVKVAKV

SEQ ID NO: 2679 - protein, 13 aa, synthetic construct
  REGION 1..13: note = GFR-binding peptide
SRVHHRPVQVRKI

SEQ ID NO: 2680 - protein, 12 aa, synthetic construct
  REGION 1..12: note = GFR-binding peptide
PTGQRPVQMRKI

SEQ ID NO: 2681 - protein, 20 aa, synthetic construct
  REGION 1..20: note = GFR-binding peptide
  VARIANT 7: note = Xaa is C or S
NDEGLEXVPTGQRSVKMAKV

SEQ ID NO: 2682 - protein, 17 aa, synthetic construct
  REGION 1..17: note = GFR-binding peptide
  VARIANT 2: note = Xaa is C or S
QXRPTQVQLSNITVQIM

SEQ ID NO: 2683 - protein, 17 aa, synthetic construct
  REGION 1..17: note = GFR-binding peptide
  VARIANT 4: note = Xaa is C or S
GLEXVPTGQRSVKMAKV

SEQ ID NO: 2684 - protein, 11 aa, synthetic construct
  REGION 1..11: note = GFR-binding peptide
TEERSVKMAKV

SEQ ID NO: 2685 - protein, 18 aa, synthetic construct
  REGION 1..18: note = GFR-binding peptide
  VARIANT 5: note = Xaa is C or S
EGLEXVPTEERPVQMRKI

SEQ ID NO: 2686 - protein, 11 aa, synthetic construct
  REGION 1..11: note = GFR-binding peptide
VHHRPVQVRKI

SEQ ID NO: 2687 - protein, 9 aa, synthetic construct
  REGION 1..9: note = GFR-binding peptide
ERSVKMAKV

SEQ ID NO: 2688 - protein, 18 aa, synthetic construct
  REGION 1..18: note = GFR-binding peptide
  VARIANT 3: note = Xaa is C or S
VKXQPSRVHHRPVQVRKI

SEQ ID NO: 2689 - protein, 18 aa, synthetic construct
  REGION 1..18: note = GFR-binding peptide
  VARIANT 5: note = Xaa is C or S
EGLEXVPTGQRPVQMRKI

SEQ ID NO: 2690 - protein, 20 aa, synthetic construct
  REGION 1..20: note = GFR-binding peptide
  VARIANT 7: note = Xaa is C or S
NDEGLEXVPTGQRPVQMRKI

SEQ ID NO: 2691 - protein, 17 aa, synthetic construct
  REGION 1..17: note = GFR-binding peptide
  VARIANT 2: note = Xaa is C or S
QXRPTQVQLRSVKVAKV

SEQ ID NO: 2692 - protein, 11 aa, synthetic construct
  REGION 1..11: note = GFR-binding peptide
VQLRSVKVAKV

SEQ ID NO: 2693 - protein, 12 aa, synthetic construct
  REGION 1..12: note = GFR-binding peptide
PTEERSVKMAKV

SEQ ID NO: 2694 - protein, 17 aa, synthetic construct
  REGION 1..17: note = GFR-binding peptide
  VARIANT 2: note = Xaa is C or S
KXQPSRVHHRPVQVRKI

SEQ ID NO: 2695 - protein, 15 aa, synthetic construct
  REGION 1..15: note = GFR-binding peptide
  VARIANT 2: note = Xaa is C or S
EXVPTGQRPVQMRKI

SEQ ID NO: 2696 - protein, 10 aa, synthetic construct
  REGION 1..10: note = GFR-binding peptide
GQRPVQMRKI

SEQ ID NO: 2697 - protein, 20 aa, synthetic construct
  REGION 1..20: note = GFR-binding peptide
  VARIANT 7: note = Xaa is C or S
NDEGLEXVPTEERPVQMRKI

SEQ ID NO: 2698 - protein, 17 aa, synthetic construct
  REGION 1..17: note = GFR-binding peptide
  VARIANT 4: note = Xaa is C or S
GLEXVPTEERSVKMAKV

SEQ ID NO: 2699 - protein, 17 aa, synthetic construct
  REGION 1..17: note = GFR-binding peptide
  VARIANT 4: note = Xaa is C or S
GLEXVPTGQRPVQMRKI

SEQ ID NO: 2700 - protein, 9 aa, synthetic construct
  REGION 1..9: note = GFR-binding peptide
ERPVQMRKI

SEQ ID NO: 2701 - protein, 19 aa, synthetic construct
  REGION 1..19: note = GFR-binding peptide
  VARIANT 4: note = Xaa is C or S
SVKXQPSRVHHSNITVQIM

SEQ ID NO: 2702 - protein, 9 aa, synthetic construct
  REGION 1..9: note = GFR-binding peptide
LSNITVQIM

SEQ ID NO: 2703 - protein, 16 aa, synthetic construct
  REGION 1..16: note = GFR-binding peptide
  VARIANT 3: note = Xaa is C or S
LEXVPTEERSVKMAKV

SEQ ID NO: 2704 - protein, 18 aa, synthetic construct
  REGION 1..18: note = GFR-binding peptide
  VARIANT 5: note = Xaa is C or S
EGLEXVPTEERSVKMAKV

SEQ ID NO: 2705 - protein, 16 aa, synthetic construct
  REGION 1..16: note = GFR-binding peptide
  VARIANT 1: note = Xaa is C or S
XQPSRVHHRPVQVRKI

SEQ ID NO: 2706 - protein, 19 aa, synthetic construct
  REGION 1..19: note = GFR-binding peptide
  VARIANT 4: note = Xaa is C or S
NVQXRPTQVQLSNITVQIM

SEQ ID NO: 2707 - protein, 9 aa, synthetic construct
  REGION 1..9: note = GFR-binding peptide
HRPVQVRKI

SEQ ID NO: 2708 - protein, 16 aa, synthetic construct
  REGION 1..16: note = GFR-binding peptide
  VARIANT 1: note = Xaa is C or S
XQPSRVHHSNITVQIM

SEQ ID NO: 2709 - protein, 9 aa, synthetic construct
  REGION 1..9: note = GFR-binding peptide
HSNITVQIM

SEQ ID NO: 2710 - protein, 15 aa, synthetic construct
  REGION 1..15: note = GFR-binding peptide
  VARIANT 2: note = Xaa is C or S
EXVPTEERPVQMRKI

SEQ ID NO: 2711 - protein, 10 aa, synthetic construct
  REGION 1..10: note = GFR-binding peptide
EERPVQMRKI

SEQ ID NO: 2712 - protein, 12 aa, synthetic construct
  REGION 1..12: note = GFR-binding peptide
PTGQRSVKMAKV

SEQ ID NO: 2713 - protein, 12 aa, synthetic construct
  REGION 1..12: note = GFR-binding peptide
QVQLSNITVQIM

SEQ ID NO: 2714 - protein, 13 aa, synthetic construct
  REGION 1..13: note = GFR-binding peptide
TQVQLRSVKVAKV

SEQ ID NO: 2715 - protein, 13 aa, synthetic construct
  REGION 1..13: note = GFR-binding peptide
VPTGQRPVQMRKI

SEQ ID NO: 2716 - protein, 18 aa, synthetic construct
  REGION 1..18: note = GFR-binding peptide
  VARIANT 3: note = Xaa is C or S
VQXRPTQVQLSNITVQIM

SEQ ID NO: 2717 - protein, 11 aa, synthetic construct
  REGION 1..11: note = GFR-binding peptide
TEERPVQMRKI

SEQ ID NO: 2718 - protein, 14 aa, synthetic construct
  REGION 1..14: note = GFR-binding peptide
PSRVHHRPVQVRKI

SEQ ID NO: 2719 - protein, 12 aa, synthetic construct
  REGION 1..12: note = GFR-binding peptide
RVHHSNITVQIM

SEQ ID NO: 2720 - protein, 19 aa, synthetic construct
  REGION 1..19: note = GFR-binding peptide
  VARIANT 6: note = Xaa is C or S
DEGLEXVPTGQRPVQMRKI

SEQ ID NO: 2721 - protein, 14 aa, synthetic construct
  REGION 1..14: note = GFR-binding peptide
  VARIANT 1: note = Xaa is C or S
XVPTEERSVKMAKV

SEQ ID NO: 2722 - protein, 10 aa, synthetic construct
  REGION 1..10: note = GFR-binding peptide
QLSNITVQIM

SEQ ID NO: 2723 - protein, 15 aa, synthetic construct
  REGION 1..15: note = GFR-binding peptide
RPTQVQLSNITVQIM

SEQ ID NO: 2724 - protein, 15 aa, synthetic construct
  REGION 1..15: note = GFR-binding peptide
RPTQVQLRSVKVAKV

SEQ ID NO: 2725 - protein, 9 aa, synthetic construct
  REGION 1..9: note = GFR-binding peptide
QRPVQMRKI

SEQ ID NO: 2726 - protein, 20 aa, synthetic construct
  REGION 1..20: note = GFR-binding peptide
  VARIANT 5: note = Xaa is C or S
RNVQXRPTQVQLSNITVQIM

SEQ ID NO: 2727 - protein, 15 aa, synthetic construct
  REGION 1..15: note = GFR-binding peptide
QPSRVHHRPVQVRKI

SEQ ID NO: 2728 - protein, 14 aa, synthetic construct
  REGION 1..14: note = GFR-binding peptide
  VARIANT 1: note = Xaa is C or S
XVPTGQRPVQMRKI

SEQ ID NO: 2729 - protein, 16 aa, synthetic construct
  REGION 1..16: note = GFR-binding peptide
  VARIANT 3: note = Xaa is C or S
LEXVPTGQRSVKMAKV

SEQ ID NO: 2730 - protein, 19 aa, synthetic construct
  REGION 1..19: note = GFR-binding peptide
  VARIANT 4: note = Xaa is C or S
SVKXQPSRVHHRPVQVRKI

SEQ ID NO: 2731 - protein, 11 aa, synthetic construct
  REGION 1..11: note = GFR-binding peptide
TGQRSVKMAKV

SEQ ID NO: 2732 - protein, 17 aa, synthetic construct
  REGION 1..17: note = GFR-binding peptide
  VARIANT 4: note = Xaa is C or S
GLEXVPTEERPVQMRKI

SEQ ID NO: 2733 - protein, 13 aa, synthetic construct
  REGION 1..13: note = GFR-binding peptide
TQVQLSNITVQIM

SEQ ID NO: 2734 - protein, 19 aa, synthetic construct
  REGION 1..19: note = GFR-binding peptide
  VARIANT 6: note = Xaa is C or S
DEGLEXVPTEERSVKMAKV

SEQ ID NO: 2735 - protein, 13 aa, synthetic construct
  REGION 1..13: note = GFR-binding peptide
VPTEERSVKMAKV

SEQ ID NO: 2736 - protein, 11 aa, synthetic construct
  REGION 1..11: note = GFR-binding peptide
VQLSNITVQIM

SEQ ID NO: 2737 - protein, 20 aa, synthetic construct
  REGION 1..20: note = GFR-binding peptide
  VARIANT 7: note = Xaa is C or S
NDEGLEXVPTEERSVKMAKV

SEQ ID NO: 2738 - protein, 16 aa, synthetic construct
  REGION 1..16: note = GFR-binding peptide
  VARIANT 3: note = Xaa is C or S
LEXVPTEERPVQMRKI

SEQ ID NO: 2739 - protein, 18 aa, synthetic construct
  REGION 1..18: note = GFR-binding peptide
  VARIANT 3: note = Xaa is C or S
VQXRPTQVQLRSVKVAKV

SEQ ID NO: 2740 - protein, 17 aa, synthetic construct
  REGION 1..17: note = GFR-binding peptide
  VARIANT 2: note = Xaa is C or S
KXQPSRVHHSNITVQIM

SEQ ID NO: 2741 - protein, 16 aa, synthetic construct
  REGION 1..16: note = GFR-binding peptide
  VARIANT 1: note = Xaa is C or S
XRPTQVQLSNITVQIM

SEQ ID NO: 2742 - protein, 14 aa, synthetic construct
  REGION 1..14: note = GFR-binding peptide
PSRVHHSNITVQIM

SEQ ID NO: 2743 - protein, 12 aa, synthetic construct
  REGION 1..12: note = GFR-binding peptide
RVHHRPVQVRKI

SEQ ID NO: 2744 - protein, 10 aa, synthetic construct
  REGION 1..10: note = GFR-binding peptide
HHRPVQVRKI

SEQ ID NO: 2745 - protein, 15 aa, synthetic construct
  REGION 1..15: note = GFR-binding peptide
  VARIANT 2: note = Xaa is C or S
EXVPTGQRSVKMAKV

SEQ ID NO: 2746 - protein, 10 aa, synthetic construct
  REGION 1..10: note = GFR-binding peptide
GQRSVKMAKV

SEQ ID NO: 2747 - protein, 12 aa, synthetic construct
  REGION 1..12: note = GFR-binding peptide
PTEERPVQMRKI

SEQ ID NO: 2748 - protein, 15 aa, synthetic construct
  REGION 1..15: note = GFR-binding peptide
  VARIANT 2: note = Xaa is C or S
EXVPTEERSVKMAKV

SEQ ID NO: 2749 - protein, 10 aa, synthetic construct
  REGION 1..10: note = GFR-binding peptide
EERSVKMAKV

SEQ ID NO: 2750 - protein, 14 aa, synthetic construct
  REGION 1..14: note = GFR-binding peptide
  VARIANT 1: note = Xaa is C or S
XVPTEERPVQMRKI

SEQ ID NO: 2751 - protein, 19 aa, synthetic construct
  REGION 1..19: note = GFR-binding peptide
  VARIANT 6: note = Xaa is C or S
DEGLEXVPTGQRSVKMAKV

SEQ ID NO: 2752 - protein, 13 aa, synthetic construct
  REGION 1..13: note = GFR-binding peptide
SRVHHSNITVQIM

SEQ ID NO: 2753 - protein, 15 aa, synthetic construct
  REGION 1..15: note = GFR-binding peptide
QPSRVHHSNITVQIM

SEQ ID NO: 2754 - protein, 12 aa, synthetic construct
  REGION 1..12: note = GFR-binding peptide
QVQLRSVKVAKV

SEQ ID NO: 2755 - protein, 9 aa, synthetic construct
  REGION 1..9: note = GFR-binding peptide
QRSVKMAKV

SEQ ID NO: 2756 - protein, 9 aa, synthetic construct
  REGION 1..9: note = GFR-binding peptide
LRSVKVAKV

SEQ ID NO: 2757 - protein, 10 aa, synthetic construct
  REGION 1..10: note = GFR-binding peptide
QLRSVKVAKV

SEQ ID NO: 2758 - protein, 20 aa, synthetic construct
  REGION 1..20: note = GFR-binding peptide
  VARIANT 5: note = Xaa is C or S
SSVKXQPSRVHHSNITVQIM

SEQ ID NO: 2759 - protein, 19 aa, synthetic construct
  REGION 1..19: note = GFR-binding peptide
  VARIANT 4: note = Xaa is C or S
NVQXRPTQVQLRSVKVAKV

SEQ ID NO: 2760 - protein, 14 aa, synthetic construct
  REGION 1..14: note = GFR-binding peptide
  VARIANT 1: note = Xaa is C or S
XVPTGQRSVKMAKV

SEQ ID NO: 2761 - protein, 19 aa, synthetic construct
  REGION 1..19: note = GFR-binding peptide
  VARIANT 6: note = Xaa is C or S
DEGLEXVPTEERPVQMRKI

SEQ ID NO: 2762 - protein, 11 aa, synthetic construct
  REGION 1..11: note = GFR-binding peptide
VHHSNITVQIM

SEQ ID NO: 2763 - protein, 11 aa, synthetic construct
  REGION 1..11: note = GFR-binding peptide
TGQRPVQMRKI

SEQ ID NO: 2764 - protein, 16 aa, synthetic construct
  REGION 1..16: note = GFR-binding peptide
  VARIANT 3: note = Xaa is C or S
LEXVPTGQRPVQMRKI

SEQ ID NO: 2765 - protein, 13 aa, synthetic construct
  REGION 1..13: note = GFR-binding peptide
VPTEERPVQMRKI

SEQ ID NO: 2766 - protein, 18 aa, synthetic construct
  REGION 1..18: note = GFR-binding peptide
  VARIANT 3: note = Xaa is C or S
VKXQPSRVHHSNITVQIM

SEQ ID NO: 2767 - protein, 14 aa, synthetic construct
  REGION 1..14: note = GFR-binding peptide
PTQVQLSNITVQIM

SEQ ID NO: 2768 - protein, 10 aa, synthetic construct
  REGION 1..10: note = GFR-binding peptide
HHSNITVQIM

SEQ ID NO: 2769 - protein, 13 aa, synthetic construct
  REGION 1..13: note = GFR-binding peptide
VPTGQRSVKMAKV

SEQ ID NO: 2770 - protein, 18 aa, synthetic construct
  REGION 1..18: note = GFR-binding peptide
  VARIANT 5: note = Xaa is C or S
EGLEXVPTGQRSVKMAKV

SEQ ID NO: 2771 - protein, 16 aa, synthetic construct
  REGION 1..16: note = GFR-binding peptide
  VARIANT 1: note = Xaa is C or S
XRPTQVQLRSVKVAKV

SEQ ID NO: 2772 - protein, 14 aa, synthetic construct
  REGION 1..14: note = GFR-binding peptide
PTQVQLRSVKVAKV

SEQ ID NO: 2773 - protein, 13 aa, synthetic construct
  REGION 1..13: note = GFR-binding peptide
SRVHHRPVQVRKI

SEQ ID NO: 2774 - protein, 12 aa, synthetic construct
  REGION 1..12: note = GFR-binding peptide
PTGQRPVQMRKI

SEQ ID NO: 2775 - protein, 20 aa, synthetic construct
  REGION 1..20: note = GFR-binding peptide
  VARIANT 7: note = Xaa is C or S
NDEGLEXVPTGQRSVKMAKV

SEQ ID NO: 2776 - protein, 17 aa, synthetic construct
  REGION 1..17: note = GFR-binding peptide
  VARIANT 2: note = Xaa is C or S
QXRPTQVQLSNITVQIM

SEQ ID NO: 2777 - protein, 17 aa, synthetic construct
  REGION 1..17: note = GFR-binding peptide
  VARIANT 4: note = Xaa is C or S
GLEXVPTGQRSVKMAKV

SEQ ID NO: 2778 - protein, 11 aa, synthetic construct
  REGION 1..11: note = GFR-binding peptide
TEERSVKMAKV

SEQ ID NO: 2779 - protein, 18 aa, synthetic construct
  REGION 1..18: note = GFR-binding peptide
  VARIANT 5: note = Xaa is C or S
EGLEXVPTEERPVQMRKI

SEQ ID NO: 2780 - protein, 11 aa, synthetic construct
  REGION 1..11: note = GFR-binding peptide
VHHRPVQVRKI

SEQ ID NO: 2781 - protein, 9 aa, synthetic construct
  REGION 1..9: note = GFR-binding peptide
ERSVKMAKV

SEQ ID NO: 2782 - protein, 18 aa, synthetic construct
  REGION 1..18: note = GFR-binding peptide
  VARIANT 3: note = Xaa is C or S
VKXQPSRVHHRPVQVRKI

SEQ ID NO: 2783 - protein, 18 aa, synthetic construct
  REGION 1..18: note = GFR-binding peptide
  VARIANT 5: note = Xaa is C or S
EGLEXVPTGQRPVQMRKI

SEQ ID NO: 2784 - protein, 20 aa, synthetic construct
  REGION 1..20: note = GFR-binding peptide
  VARIANT 7: note = Xaa is C or S
NDEGLEXVPTGQRPVQMRKI

SEQ ID NO: 2785 - protein, 17 aa, synthetic construct
  REGION 1..17: note = GFR-binding peptide
  VARIANT 2: note = Xaa is C or S
QXRPTQVQLRSVKVAKV

SEQ ID NO: 2786 - protein, 11 aa, synthetic construct
  REGION 1..11: note = GFR-binding peptide
VQLRSVKVAKV

SEQ ID NO: 2787 - protein, 12 aa, synthetic construct
  REGION 1..12: note = GFR-binding peptide
PTEERSVKMAKV

SEQ ID NO: 2788 - protein, 17 aa, synthetic construct
  REGION 1..17: note = GFR-binding peptide
  VARIANT 2: note = Xaa is C or S
KXQPSRVHHRPVQVRKI

SEQ ID NO: 2789 - protein, 15 aa, synthetic construct
  REGION 1..15: note = GFR-binding peptide
  VARIANT 2: note = Xaa is C or S
EXVPTGQRPVQMRKI

SEQ ID NO: 2790 - protein, 10 aa, synthetic construct
  REGION 1..10: note = GFR-binding peptide
GQRPVQMRKI

SEQ ID NO: 2791 - protein, 20 aa, synthetic construct
  REGION 1..20: note = GFR-binding peptide
  VARIANT 7: note = Xaa is C or S
NDEGLEXVPTEERPVQMRKI

SEQ ID NO: 2792 - protein, 17 aa, synthetic construct
  REGION 1..17: note = GFR-binding peptide
  VARIANT 4: note = Xaa is C or S
GLEXVPTEERSVKMAKV

SEQ ID NO: 2793 - protein, 17 aa, synthetic construct
  REGION 1..17: note = GFR-binding peptide
  VARIANT 4: note = Xaa is C or S
GLEXVPTGQRPVQMRKI

SEQ ID NO: 2794 - protein, 9 aa, synthetic construct
  REGION 1..9: note = GFR-binding peptide
ERPVQMRKI

SEQ ID NO: 2795 - protein, 19 aa, synthetic construct
  REGION 1..19: note = GFR-binding peptide
  VARIANT 4: note = Xaa is C or S
SVKXQPSRVHHSNITVQIM

SEQ ID NO: 2796 - protein, 9 aa, synthetic construct
  REGION 1..9: note = GFR-binding peptide
LSNITVQIM

SEQ ID NO: 2797 - protein, 16 aa, synthetic construct
  REGION 1..16: note = GFR-binding peptide
  VARIANT 3: note = Xaa is C or S
LEXVPTEERSVKMAKV

SEQ ID NO: 2798 - protein, 18 aa, synthetic construct
  REGION 1..18: note = GFR-binding peptide
  VARIANT 5: note = Xaa is C or S
EGLEXVPTEERSVKMAKV

SEQ ID NO: 2799 - protein, 16 aa, synthetic construct
  REGION 1..16: note = GFR-binding peptide
  VARIANT 1: note = Xaa is C or S
XQPSRVHHRPVQVRKI

SEQ ID NO: 2800 - protein, 19 aa, synthetic construct
  REGION 1..19: note = GFR-binding peptide
  VARIANT 4: note = Xaa is C or S
NVQXRPTQVQLSNITVQIM

SEQ ID NO: 2801 - protein, 9 aa, synthetic construct
  REGION 1..9: note = GFR-binding peptide
HRPVQVRKI

SEQ ID NO: 2802 - protein, 16 aa, synthetic construct
  REGION 1..16: note = GFR-binding peptide
  VARIANT 1: note = Xaa is C or S
XQPSRVHHSNITVQIM

SEQ ID NO: 2803 - protein, 9 aa, synthetic construct
  REGION 1..9: note = GFR-binding peptide
HSNITVQIM

SEQ ID NO: 2804 - protein, 15 aa, synthetic construct
  REGION 1..15: note = GFR-binding peptide
  VARIANT 2: note = Xaa is C or S
EXVPTEERPVQMRKI

SEQ ID NO: 2805 - protein, 10 aa, synthetic construct
  REGION 1..10: note = GFR-binding peptide
EERPVQMRKI

SEQ ID NO: 2806 - protein, 12 aa, synthetic construct
  REGION 1..12: note = GFR-binding peptide
PTGQRSVKMAKV

SEQ ID NO: 2807 - protein, 12 aa, synthetic construct
  REGION 1..12: note = GFR-binding peptide
QVQLSNITVQIM

SEQ ID NO: 2808 - protein, 18 aa, synthetic construct
  REGION 1..18: note = GFR-binding peptide
  VARIANT 4..5: note = Xaa is C or S
PKAXXVPTELSPISMLYK

SEQ ID NO: 2809 - protein, 10 aa, synthetic construct
  REGION 1..10: note = GFR-binding peptide
ELSPISMLYI

SEQ ID NO: 2810 - protein, 18 aa, synthetic construct
  REGION 1..18: note = GFR-binding peptide
  VARIANT 4..5: note = Xaa is C or S
ASPXXVSQDLSPISILYI

SEQ ID NO: 2811 - protein, 10 aa, synthetic construct
  REGION 1..10: note = GFR-binding peptide
ELSPISMLYK

SEQ ID NO: 2812 - protein, 18 aa, synthetic construct
  REGION 1..18: note = GFR-binding peptide
  VARIANT 4..5: note = Xaa is C or S
ASPXXVSQDLSPISILYK

SEQ ID NO: 2813 - protein, 13 aa, synthetic construct
  REGION 1..13: note = GFR-binding peptide
VPQDLEPISILYL

SEQ ID NO: 2814 - protein, 14 aa, synthetic construct
  REGION 1..14: note = GFR-binding peptide
  VARIANT 1: note = Xaa is C or S
XVPTKLNAISILYF

SEQ ID NO: 2815 - protein, 13 aa, synthetic construct
  REGION 1..13: note = GFR-binding peptide
VPTELEPISMLYL

SEQ ID NO: 2816 - protein, 15 aa, synthetic construct
  REGION 1..15: note = GFR-binding peptide
  VARIANT 1..2: note = Xaa is C or S
XXAPTKLEPISVLYL

SEQ ID NO: 2817 - protein, 19 aa, synthetic construct
  REGION 1..19: note = GFR-binding peptide
  VARIANT 5..6: note = Xaa is C or S
APASXXVPARLSPISILYK

SEQ ID NO: 2818 - protein, 14 aa, synthetic construct
  REGION 1..14: note = GFR-binding peptide
  VARIANT 1: note = Xaa is C or S
XVSQDLEPISILYL

SEQ ID NO: 2819 - protein, 11 aa, synthetic construct
  REGION 1..11: note = GFR-binding peptide
QDLNAISILYF

SEQ ID NO: 2820 - protein, 19 aa, synthetic construct
  REGION 1..19: note = GFR-binding peptide
  VARIANT 5..6: note = Xaa is C or S
VPKPXXAPTKLEPISVLYL

SEQ ID NO: 2821 - protein, 16 aa, synthetic construct
  REGION 1..16: note = GFR-binding peptide
  VARIANT 3: note = Xaa is C or S
PTXAPTKLEPISVLYL

SEQ ID NO: 2822 - protein, 10 aa, synthetic construct
  REGION 1..10: note = GFR-binding peptide
DLEPISILYL

SEQ ID NO: 2823 - protein, 17 aa, synthetic construct
  REGION 1..17: note = GFR-binding peptide
  VARIANT 3..4: note = Xaa is C or S
ASXXVPARLEPISILYL

SEQ ID NO: 2824 - protein, 12 aa, synthetic construct
  REGION 1..12: note = GFR-binding peptide
PQALSPISILYI

SEQ ID NO: 2825 - protein, 12 aa, synthetic construct
  REGION 1..12: note = GFR-binding peptide
PQALSPISILYK

SEQ ID NO: 2826 - protein, 12 aa, synthetic construct
  REGION 1..12: note = GFR-binding peptide
PARLNAISILYF

SEQ ID NO: 2827 - protein, 14 aa, synthetic construct
  REGION 1..14: note = GFR-binding peptide
  VARIANT 1: note = Xaa is C or S
XVPTKLSPISILYI

SEQ ID NO: 2828 - protein, 18 aa, synthetic construct
  REGION 1..18: note = GFR-binding peptide
  VARIANT 4..5: note = Xaa is C or S
PKAXXVPTELSPISMLYI

SEQ ID NO: 2829 - protein, 14 aa, synthetic construct
  REGION 1..14: note = GFR-binding peptide
  VARIANT 1: note = Xaa is C or S
XVPTKLSPISILYK

SEQ ID NO: 2830 - protein, 19 aa, synthetic construct
  REGION 1..19: note = GFR-binding peptide
  VARIANT 5..6: note = Xaa is C or S
VGKAXXVPTKLEPISVLYL

SEQ ID NO: 2831 - protein, 10 aa, synthetic construct
  REGION 1..10: note = GFR-binding peptide
ELNAISMLYF

SEQ ID NO: 2832 - protein, 16 aa, synthetic construct
  REGION 1..16: note = GFR-binding peptide
  VARIANT 2..3: note = Xaa is C or S
PXXVPQDLEPISILYL

SEQ ID NO: 2833 - protein, 18 aa, synthetic construct
  REGION 1..18: note = GFR-binding peptide
  VARIANT 4..5: note = Xaa is C or S
PKAXXAPTKLNAISVLYF

SEQ ID NO: 2834 - protein, 17 aa, synthetic construct
  REGION 1..17: note = GFR-binding peptide
  VARIANT 3..4: note = Xaa is C or S
SPXXVSQDLEPISILYL

SEQ ID NO: 2835 - protein, 16 aa, synthetic construct
  REGION 1..16: note = GFR-binding peptide
  VARIANT 2..3: note = Xaa is C or S
SXXVPARLNAISILYF

SEQ ID NO: 2836 - protein, 9 aa, synthetic construct
  REGION 1..9: note = GFR-binding peptide
LEPISVLYL

SEQ ID NO: 2837 - protein, 19 aa, synthetic construct
  REGION 1..19: note = GFR-binding peptide
  VARIANT 5..6: note = Xaa is C or S
APASXXVPARLNAISILYF

SEQ ID NO: 2838 - protein, 12 aa, synthetic construct
  REGION 1..12: note = GFR-binding peptide
PTQLSPISVLYK

SEQ ID NO: 2839 - protein, 12 aa, synthetic construct
  REGION 1..12: note = GFR-binding peptide
PTQLSPISVLYI

SEQ ID NO: 2840 - protein, 17 aa, synthetic construct
  REGION 1..17: note = GFR-binding peptide
  VARIANT 4: note = Xaa is C or S
KPTXAPTKLEPISVLYL

SEQ ID NO: 2841 - protein, 10 aa, synthetic construct
  REGION 1..10: note = GFR-binding peptide
KLSPISVLYI

SEQ ID NO: 2842 - protein, 11 aa, synthetic construct
  REGION 1..11: note = GFR-binding peptide
QALEPISILYL

SEQ ID NO: 2843 - protein, 16 aa, synthetic construct
  REGION 1..16: note = GFR-binding peptide
  VARIANT 2..3: note = Xaa is C or S
SXXVPARLSPISILYK

SEQ ID NO: 2844 - protein, 17 aa, synthetic construct
  REGION 1..17: note = GFR-binding peptide
  VARIANT 3..4: note = Xaa is C or S
KAXXAPTKLEPISVLYL

SEQ ID NO: 2845 - protein, 10 aa, synthetic construct
  REGION 1..10: note = GFR-binding peptide
RLEPISILYL

SEQ ID NO: 2846 - protein, 13 aa, synthetic construct
  REGION 1..13: note = GFR-binding peptide
VPARLNAISILYF

SEQ ID NO: 2847 - protein, 20 aa, synthetic construct
  REGION 1..20: note = GFR-binding peptide
  VARIANT 6..7: note = Xaa is C or S
SIPKAXXVPTELEPISMLYL

SEQ ID NO: 2848 - protein, 20 aa, synthetic construct
  REGION 1..20: note = GFR-binding peptide
  VARIANT 7: note = Xaa is C or S
HVTKPTXAPTKLEPISVLYL

SEQ ID NO: 2849 - protein, 15 aa, synthetic construct
  REGION 1..15: note = GFR-binding peptide
  VARIANT 1..2: note = Xaa is C or S
XXVPARLSPISILYK

SEQ ID NO: 2850 - protein, 15 aa, synthetic construct
  REGION 1..15: note = GFR-binding peptide
  VARIANT 1..2: note = Xaa is C or S
XXVPTELEPISMLYL

SEQ ID NO: 2851 - protein, 15 aa, synthetic construct
  REGION 1..15: note = GFR-binding peptide
  VARIANT 2: note = Xaa is C or S
TXAPTKLEPISVLYL

SEQ ID NO: 2852 - protein, 15 aa, synthetic construct
  REGION 1..15: note = GFR-binding peptide
  VARIANT 1..2: note = Xaa is C or S
XXVPQDLEPISILYL

SEQ ID NO: 2853 - protein, 17 aa, synthetic construct
  REGION 1..17: note = GFR-binding peptide
  VARIANT 3..4: note = Xaa is C or S
SPXXVPQDLNAISILYF

SEQ ID NO: 2854 - protein, 14 aa, synthetic construct
  REGION 1..14: note = GFR-binding peptide
  VARIANT 1: note = Xaa is C or S
XAPTQLEPISVLYL

SEQ ID NO: 2855 - protein, 11 aa, synthetic construct
  REGION 1..11: note = GFR-binding peptide
QDLSPISILYI

SEQ ID NO: 2856 - protein, 11 aa, synthetic construct
  REGION 1..11: note = GFR-binding peptide
QDLSPISILYK

SEQ ID NO: 2857 - protein, 19 aa, synthetic construct
  REGION 1..19: note = GFR-binding peptide
  VARIANT 5..6: note = Xaa is C or S
SAAPXXVPQALEPISILYL

SEQ ID NO: 2858 - protein, 18 aa, synthetic construct
  REGION 1..18: note = GFR-binding peptide
  VARIANT 4..5: note = Xaa is C or S
PASXXVPARLNAISILYF

SEQ ID NO: 2859 - protein, 11 aa, synthetic construct
  REGION 1..11: note = GFR-binding peptide
TQLEPISVLYL

SEQ ID NO: 2860 - protein, 18 aa, synthetic construct
  REGION 1..18: note = GFR-binding peptide
  VARIANT 4..5: note = Xaa is C or S
PKAXXVPTELNAISMLYF

SEQ ID NO: 2861 - protein, 13 aa, synthetic construct
  REGION 1..13: note = GFR-binding peptide
VPTKLEPISVLYL

SEQ ID NO: 2862 - protein, 11 aa, synthetic construct
  REGION 1..11: note = GFR-binding peptide
TELSPISMLYK

SEQ ID NO: 2863 - protein, 11 aa, synthetic construct
  REGION 1..11: note = GFR-binding peptide
TELSPISMLYI

SEQ ID NO: 2864 - protein, 13 aa, synthetic construct
  REGION 1..13: note = GFR-binding peptide
VPARLSPISILYK

SEQ ID NO: 2865 - protein, 11 aa, synthetic construct
  REGION 1..11: note = GFR-binding peptide
TKLSPISVLYI

SEQ ID NO: 2866 - protein, 16 aa, synthetic construct
  REGION 1..16: note = GFR-binding peptide
  VARIANT 2..3: note = Xaa is C or S
PXXAPTKLEPISVLYL

SEQ ID NO: 2867 - protein, 17 aa, synthetic construct
  REGION 1..17: note = GFR-binding peptide
  VARIANT 3..4: note = Xaa is C or S
KAXXVPTELSPISMLYI

SEQ ID NO: 2868 - protein, 15 aa, synthetic construct
  REGION 1..15: note = GFR-binding peptide
  VARIANT 1..2: note = Xaa is C or S
XXVPTKLEPISVLYL

SEQ ID NO: 2869 - protein, 17 aa, synthetic construct
  REGION 1..17: note = GFR-binding peptide
  VARIANT 3..4: note = Xaa is C or S
APXXVPQALSPISILYK

SEQ ID NO: 2870 - protein, 17 aa, synthetic construct
  REGION 1..17: note = GFR-binding peptide
  VARIANT 3..4: note = Xaa is C or S
APXXVPQALSPISILYI

SEQ ID NO: 2871 - protein, 18 aa, synthetic construct
  REGION 1..18: note = GFR-binding peptide
  VARIANT 4..5: note = Xaa is C or S
GKAXXVPTKLNAISVLYF

SEQ ID NO: 2872 - protein, 15 aa, synthetic construct
  REGION 1..15: note = GFR-binding peptide
  VARIANT 1..2: note = Xaa is C or S
XXVPARLNAISILYF

SEQ ID NO: 2873 - protein, 17 aa, synthetic construct
  REGION 1..17: note = GFR-binding peptide
  VARIANT 3..4: note = Xaa is C or S
KAXXVPTELNAISMLYF

SEQ ID NO: 2874 - protein, 9 aa, synthetic construct
  REGION 1..9: note = GFR-binding peptide
LEPISMLYL

SEQ ID NO: 2875 - protein, 17 aa, synthetic construct
  REGION 1..17: note = GFR-binding peptide
  VARIANT 3..4: note = Xaa is C or S
APXXVPQALNAISILYF

SEQ ID NO: 2876 - protein, 18 aa, synthetic construct
  REGION 1..18: note = GFR-binding peptide
  VARIANT 4..5: note = Xaa is C or S
GKAXXVPTKLSPISVLYI

SEQ ID NO: 2877 - protein, 19 aa, synthetic construct
  REGION 1..19: note = GFR-binding peptide
  VARIANT 5..6: note = Xaa is C or S
SASPXXVPQDLEPISILYL

SEQ ID NO: 2878 - protein, 20 aa, synthetic construct
  REGION 1..20: note = GFR-binding peptide
  VARIANT 6..7: note = Xaa is C or S
KVGKAXXVPTKLEPISVLYL

SEQ ID NO: 2879 - protein, 11 aa, synthetic construct
  REGION 1..11: note = GFR-binding peptide
TELNAISMLYF

SEQ ID NO: 2880 - protein, 17 aa, synthetic construct
  REGION 1..17: note = GFR-binding peptide
  VARIANT 3..4: note = Xaa is C or S
KAXXVPTELSPISMLYK

SEQ ID NO: 2881 - protein, 20 aa, synthetic construct
  REGION 1..20: note = GFR-binding peptide
  VARIANT 6..7: note = Xaa is C or S
TVPKPXXAPTQLSPISVLYI

SEQ ID NO: 2882 - protein, 17 aa, synthetic construct
  REGION 1..17: note = GFR-binding peptide
  VARIANT 3..4: note = Xaa is C or S
APXXVPQALEPISILYL

SEQ ID NO: 2883 - protein, 18 aa, synthetic construct
  REGION 1..18: note = GFR-binding peptide
  VARIANT 4..5: note = Xaa is C or S
ASPXXVPQDLSPISILYI

SEQ ID NO: 2884 - protein, 18 aa, synthetic construct
  REGION 1..18: note = GFR-binding peptide
  VARIANT 4..5: note = Xaa is C or S
ASPXXVPQDLSPISILYK

SEQ ID NO: 2885 - protein, 14 aa, synthetic construct
  REGION 1..14: note = GFR-binding peptide
  VARIANT 1: note = Xaa is C or S
XVPTKLSPISVLYI

SEQ ID NO: 2886 - protein, 17 aa, synthetic construct
  REGION 1..17: note = GFR-binding peptide
  VARIANT 3..4: note = Xaa is C or S
KAXXAPTKLNAISVLYF

SEQ ID NO: 2887 - protein, 17 aa, synthetic construct
  REGION 1..17: note = GFR-binding peptide
  VARIANT 3..4: note = Xaa is C or S
SPXXVPQDLSPISILYK

SEQ ID NO: 2888 - protein, 17 aa, synthetic construct
  REGION 1..17: note = GFR-binding peptide
  VARIANT 3..4: note = Xaa is C or S
SPXXVPQDLSPISILYI

SEQ ID NO: 2889 - protein, 16 aa, synthetic construct
  REGION 1..16: note = GFR-binding peptide
  VARIANT 2..3: note = Xaa is C or S
PXXVPQALSPISILYI

SEQ ID NO: 2890 - protein, 20 aa, synthetic construct
  REGION 1..20: note = GFR-binding peptide
  VARIANT 6..7: note = Xaa is C or S
AVPKAXXAPTKLSPISVLYI

SEQ ID NO: 2891 - protein, 16 aa, synthetic construct
  REGION 1..16: note = GFR-binding peptide
  VARIANT 2..3: note = Xaa is C or S
PXXVPQALSPISILYK

SEQ ID NO: 2892 - protein, 16 aa, synthetic construct
  REGION 1..16: note = GFR-binding peptide
  VARIANT 2..3: note = Xaa is C or S
PXXAPTQLEPISVLYL

SEQ ID NO: 2893 - protein, 20 aa, synthetic construct
  REGION 1..20: note = GFR-binding peptide
  VARIANT 6..7: note = Xaa is C or S
TVPKPXXAPTQLEPISVLYL

SEQ ID NO: 2894 - protein, 19 aa, synthetic construct
  REGION 1..19: note = GFR-binding peptide
  VARIANT 5..6: note = Xaa is C or S
VPKPXXAPTQLEPISVLYL

SEQ ID NO: 2895 - protein, 17 aa, synthetic construct
  REGION 1..17: note = GFR-binding peptide
  VARIANT 3..4: note = Xaa is C or S
KAXXVPTKLNAISVLYF

SEQ ID NO: 2896 - protein, 19 aa, synthetic construct
  REGION 1..19: note = GFR-binding peptide
  VARIANT 5..6: note = Xaa is C or S
SASPXXVSQDLSPISILYI

SEQ ID NO: 2897 - protein, 19 aa, synthetic construct
  REGION 1..19: note = GFR-binding peptide
  VARIANT 5..6: note = Xaa is C or S
SASPXXVSQDLSPISILYK

SEQ ID NO: 2898 - protein, 17 aa, synthetic construct
  REGION 1..17: note = GFR-binding peptide
  VARIANT 3..4: note = Xaa is C or S
KPXXAPTKLEPISVLYL

SEQ ID NO: 2899 - protein, 15 aa, synthetic construct
  REGION 1..15: note = GFR-binding peptide
  VARIANT 1..2: note = Xaa is C or S
XXVPQDLNAISILYF

SEQ ID NO: 2900 - protein, 14 aa, synthetic construct
  REGION 1..14: note = GFR-binding peptide
  VARIANT 1: note = Xaa is C or S
XVPTELSPISMLYK

SEQ ID NO: 2901 - protein, 20 aa, synthetic construct
  REGION 1..20: note = GFR-binding peptide
  VARIANT 6..7: note = Xaa is C or S
KIPKAXXVPTELNAISMLYF

SEQ ID NO: 2902 - protein, 11 aa, synthetic construct
  REGION 1..11: note = GFR-binding peptide
TKLEPISVLYL

SEQ ID NO: 2903 - protein, 18 aa, synthetic construct
  REGION 1..18: note = GFR-binding peptide
  VARIANT 4..5: note = Xaa is C or S
ASPXXVPQDLEPISILYL

SEQ ID NO: 2904 - protein, 10 aa, synthetic construct
  REGION 1..10: note = GFR-binding peptide
RLNAISILYF

SEQ ID NO: 2905 - protein, 12 aa, synthetic construct
  REGION 1..12: note = GFR-binding peptide
SQDLNAISILYF

SEQ ID NO: 2906 - protein, 10 aa, synthetic construct
  REGION 1..10: note = GFR-binding peptide
ALNAISILYF

SEQ ID NO: 2907 - protein, 13 aa, synthetic construct
  REGION 1..13: note = GFR-binding peptide
VPTKLNAISILYF

SEQ ID NO: 2908 - protein, 20 aa, synthetic construct
  REGION 1..20: note = GFR-binding peptide
  VARIANT 6..7: note = Xaa is C or S
KVGKAXXVPTKLSPISVLYI

SEQ ID NO: 2909 - protein, 15 aa, synthetic construct
  REGION 1..15: note = GFR-binding peptide
  VARIANT 1..2: note = Xaa is C or S
XXVPTKLNAISILYF

SEQ ID NO: 2910 - protein, 15 aa, synthetic construct
  REGION 1..15: note = GFR-binding peptide
  VARIANT 1..2: note = Xaa is C or S
XXVPQALNAISILYF

SEQ ID NO: 2911 - protein, 13 aa, synthetic construct
  REGION 1..13: note = GFR-binding peptide
VPQALNAISILYF

SEQ ID NO: 2912 - protein, 17 aa, synthetic construct
  REGION 1..17: note = GFR-binding peptide
  VARIANT 3..4: note = Xaa is C or S
KAXXVPTELEPISMLYL

SEQ ID NO: 2913 - protein, 12 aa, synthetic construct
  REGION 1..12: note = GFR-binding peptide
PARLSPISILYK

SEQ ID NO: 2914 - protein, 15 aa, synthetic construct
  REGION 1..15: note = GFR-binding peptide
  VARIANT 2: note = Xaa is C or S
TXAPTKLSPISVLYI

SEQ ID NO: 2915 - protein, 12 aa, synthetic construct
  REGION 1..12: note = GFR-binding peptide
PTELSPISMLYK

SEQ ID NO: 2916 - protein, 12 aa, synthetic construct
  REGION 1..12: note = GFR-binding peptide
PTELSPISMLYI

SEQ ID NO: 2917 - protein, 9 aa, synthetic construct
  REGION 1..9: note = GFR-binding peptide
LSPISMLYK

SEQ ID NO: 2918 - protein, 15 aa, synthetic construct
  REGION 1..15: note = GFR-binding peptide
  VARIANT 2: note = Xaa is C or S
TXAPTKLSPISVLYK

SEQ ID NO: 2919 - protein, 9 aa, synthetic construct
  REGION 1..9: note = GFR-binding peptide
LSPISMLYI

SEQ ID NO: 2920 - protein, 14 aa, synthetic construct
  REGION 1..14: note = GFR-binding peptide
  VARIANT 1: note = Xaa is C or S
XVSQDLNAISILYF

SEQ ID NO: 2921 - protein, 13 aa, synthetic construct
  REGION 1..13: note = GFR-binding peptide
APTKLEPISVLYL

SEQ ID NO: 2922 - protein, 10 aa, synthetic construct
  REGION 1..10: note = GFR-binding peptide
KLSPISILYK

SEQ ID NO: 2923 - protein, 10 aa, synthetic construct
  REGION 1..10: note = GFR-binding peptide
KLSPISILYI

SEQ ID NO: 2924 - protein, 11 aa, synthetic construct
  REGION 1..11: note = GFR-binding peptide
ARLEPISILYL

SEQ ID NO: 2925 - protein, 15 aa, synthetic construct
  REGION 1..15: note = GFR-binding peptide
  VARIANT 1..2: note = Xaa is C or S
XXVPTELSPISMLYK

SEQ ID NO: 2926 - protein, 14 aa, synthetic construct
  REGION 1..14: note = GFR-binding peptide
  VARIANT 1: note = Xaa is C or S
XVPQDLNAISILYF

SEQ ID NO: 2927 - protein, 15 aa, synthetic construct
  REGION 1..15: note = GFR-binding peptide
  VARIANT 1..2: note = Xaa is C or S
XXVPTELSPISMLYI

SEQ ID NO: 2928 - protein, 13 aa, synthetic construct
  REGION 1..13: note = GFR-binding peptide
VPQDLNAISILYF

SEQ ID NO: 2929 - protein, 20 aa, synthetic construct
  REGION 1..20: note = GFR-binding peptide
  VARIANT 6..7: note = Xaa is C or S
ASASPXXVPQDLSPISILYK

SEQ ID NO: 2930 - protein, 17 aa, synthetic construct
  REGION 1..17: note = GFR-binding peptide
  VARIANT 3..4: note = Xaa is C or S
KAXXVPTKLEPISVLYL

SEQ ID NO: 2931 - protein, 19 aa, synthetic construct
  REGION 1..19: note = GFR-binding peptide
  VARIANT 5..6: note = Xaa is C or S
VGKAXXVPTKLNAISVLYF

SEQ ID NO: 2932 - protein, 14 aa, synthetic construct
  REGION 1..14: note = GFR-binding peptide
  VARIANT 1: note = Xaa is C or S
XVPQALEPISILYL

SEQ ID NO: 2933 - protein, 14 aa, synthetic construct
  REGION 1..14: note = GFR-binding peptide
  VARIANT 1: note = Xaa is C or S
XVPTELSPISMLYI

SEQ ID NO: 2934 - protein, 16 aa, synthetic construct
  REGION 1..16: note = GFR-binding peptide
  VARIANT 2..3: note = Xaa is C or S
AXXVPTKLNAISVLYF

SEQ ID NO: 2935 - protein, 16 aa, synthetic construct
  REGION 1..16: note = GFR-binding peptide
  VARIANT 2..3: note = Xaa is C or S
PXXVSQDLSPISILYI

SEQ ID NO: 2936 - protein, 16 aa, synthetic construct
  REGION 1..16: note = GFR-binding peptide
  VARIANT 2..3: note = Xaa is C or S
PXXVSQDLSPISILYK

SEQ ID NO: 2937 - protein, 14 aa, synthetic construct
  REGION 1..14: note = GFR-binding peptide
  VARIANT 1: note = Xaa is C or S
XAPTKLEPISVLYL

SEQ ID NO: 2938 - protein, 10 aa, synthetic construct
  REGION 1..10: note = GFR-binding peptide
DLNAISILYF

SEQ ID NO: 2939 - protein, 18 aa, synthetic construct
  REGION 1..18: note = GFR-binding peptide
  VARIANT 5: note = Xaa is C or S
TKPTXAPTKLEPISVLYL

SEQ ID NO: 2940 - protein, 20 aa, synthetic construct
  REGION 1..20: note = GFR-binding peptide
  VARIANT 6..7: note = Xaa is C or S
ASAAPXXVPQALNAISILYF

SEQ ID NO: 2941 - protein, 18 aa, synthetic construct
  REGION 1..18: note = GFR-binding peptide
  VARIANT 4..5: note = Xaa is C or S
SKAXXVPTKLSPISILYK

SEQ ID NO: 2942 - protein, 18 aa, synthetic construct
  REGION 1..18: note = GFR-binding peptide
  VARIANT 4..5: note = Xaa is C or S
SKAXXVPTKLSPISILYI

SEQ ID NO: 2943 - protein, 17 aa, synthetic construct
  REGION 1..17: note = GFR-binding peptide
  VARIANT 3..4: note = Xaa is C or S
KPXXAPTQLEPISVLYL

SEQ ID NO: 2944 - protein, 18 aa, synthetic construct
  REGION 1..18: note = GFR-binding peptide
  VARIANT 4..5: note = Xaa is C or S
ASPXXVSQDLNAISILYF

SEQ ID NO: 2945 - protein, 12 aa, synthetic construct
  REGION 1..12: note = GFR-binding peptide
PQDLEPISILYL

SEQ ID NO: 2946 - protein, 14 aa, synthetic construct
  REGION 1..14: note = GFR-binding peptide
  VARIANT 1: note = Xaa is C or S
XVPARLSPISILYK

SEQ ID NO: 2947 - protein, 12 aa, synthetic construct
  REGION 1..12: note = GFR-binding peptide
PTKLSPISVLYI

SEQ ID NO: 2948 - protein, 20 aa, synthetic construct
  REGION 1..20: note = GFR-binding peptide
  VARIANT 6..7: note = Xaa is C or S
KIPKAXXVPTELEPISMLYL

SEQ ID NO: 2949 - protein, 12 aa, synthetic construct
  REGION 1..12: note = GFR-binding peptide
PQALNAISILYF

SEQ ID NO: 2950 - protein, 16 aa, synthetic construct
  REGION 1..16: note = GFR-binding peptide
  VARIANT 2..3: note = Xaa is C or S
AXXVPTKLEPISVLYL

SEQ ID NO: 2951 - protein, 16 aa, synthetic construct
  REGION 1..16: note = GFR-binding peptide
  VARIANT 2..3: note = Xaa is C or S
AXXVPTELEPISMLYL

SEQ ID NO: 2952 - protein, 18 aa, synthetic construct
  REGION 1..18: note = GFR-binding peptide
  VARIANT 4..5: note = Xaa is C or S
PKPXXAPTQLEPISVLYL

SEQ ID NO: 2953 - protein, 17 aa, synthetic construct
  REGION 1..17: note = GFR-binding peptide
  VARIANT 3..4: note = Xaa is C or S
KAXXVPTKLNAISILYF

SEQ ID NO: 2954 - protein, 20 aa, synthetic construct
  REGION 1..20: note = GFR-binding peptide
  VARIANT 6..7: note = Xaa is C or S
AAPASXXVPARLSPISILYK

SEQ ID NO: 2955 - protein, 13 aa, synthetic construct
  REGION 1..13: note = GFR-binding peptide
APTQLEPISVLYL

SEQ ID NO: 2956 - protein, 14 aa, synthetic construct
  REGION 1..14: note = GFR-binding peptide
  VARIANT 1: note = Xaa is C or S
XVPQDLEPISILYL

SEQ ID NO: 2957 - protein, 16 aa, synthetic construct
  REGION 1..16: note = GFR-binding peptide
  VARIANT 2..3: note = Xaa is C or S
SXXVPARLEPISILYL

SEQ ID NO: 2958 - protein, 19 aa, synthetic construct
  REGION 1..19: note = GFR-binding peptide
  VARIANT 5..6: note = Xaa is C or S
VPKAXXAPTKLEPISVLYL

SEQ ID NO: 2959 - protein, 15 aa, synthetic construct
  REGION 1..15: note = GFR-binding peptide
  VARIANT 1..2: note = Xaa is C or S
XXAPTQLEPISVLYL

SEQ ID NO: 2960 - protein, 11 aa, synthetic construct
  REGION 1..11: note = GFR-binding peptide
TKLNAISILYF

SEQ ID NO: 2961 - protein, 19 aa, synthetic construct
  REGION 1..19: note = GFR-binding peptide
  VARIANT 6: note = Xaa is C or S
VTKPTXAPTKLEPISVLYL

SEQ ID NO: 2962 - protein, 9 aa, synthetic construct
  REGION 1..9: note = GFR-binding peptide
LNAISILYF

SEQ ID NO: 2963 - protein, 12 aa, synthetic construct
  REGION 1..12: note = GFR-binding peptide
PTKLSPISILYI

SEQ ID NO: 2964 - protein, 17 aa, synthetic construct
  REGION 1..17: note = GFR-binding peptide
  VARIANT 3..4: note = Xaa is C or S
SPXXVSQDLSPISILYK

SEQ ID NO: 2965 - protein, 14 aa, synthetic construct
  REGION 1..14: note = GFR-binding peptide
  VARIANT 1: note = Xaa is C or S
XVPQALNAISILYF

SEQ ID NO: 2966 - protein, 17 aa, synthetic construct
  REGION 1..17: note = GFR-binding peptide
  VARIANT 3..4: note = Xaa is C or S
SPXXVSQDLSPISILYI

SEQ ID NO: 2967 - protein, 20 aa, synthetic construct
  REGION 1..20: note = GFR-binding peptide
  VARIANT 6..7: note = Xaa is C or S
KASKAXXVPTKLSPISILYK

SEQ ID NO: 2968 - protein, 15 aa, synthetic construct
  REGION 1..15: note = GFR-binding peptide
  VARIANT 1..2: note = Xaa is C or S
XXAPTKLSPISVLYK

SEQ ID NO: 2969 - protein, 13 aa, synthetic construct
  REGION 1..13: note = GFR-binding peptide
VPARLEPISILYL

SEQ ID NO: 2970 - protein, 15 aa, synthetic construct
  REGION 1..15: note = GFR-binding peptide
  VARIANT 1..2: note = Xaa is C or S
XXAPTKLSPISVLYI

SEQ ID NO: 2971 - protein, 20 aa, synthetic construct
  REGION 1..20: note = GFR-binding peptide
  VARIANT 6..7: note = Xaa is C or S
AAPASXXVPARLNAISILYF

SEQ ID NO: 2972 - protein, 19 aa, synthetic construct
  REGION 1..19: note = GFR-binding peptide
  VARIANT 5..6: note = Xaa is C or S
APASXXVPARLEPISILYL

SEQ ID NO: 2973 - protein, 16 aa, synthetic construct
  REGION 1..16: note = GFR-binding peptide
  VARIANT 2..3: note = Xaa is C or S
PXXAPTKLSPISVLYK

SEQ ID NO: 2974 - protein, 16 aa, synthetic construct
  REGION 1..16: note = GFR-binding peptide
  VARIANT 2..3: note = Xaa is C or S
PXXAPTKLSPISVLYI

SEQ ID NO: 2975 - protein, 19 aa, synthetic construct
  REGION 1..19: note = GFR-binding peptide
  VARIANT 5..6: note = Xaa is C or S
SAAPXXVPQALSPISILYI

SEQ ID NO: 2976 - protein, 19 aa, synthetic construct
  REGION 1..19: note = GFR-binding peptide
  VARIANT 5..6: note = Xaa is C or S
SAAPXXVPQALSPISILYK

SEQ ID NO: 2977 - protein, 18 aa, synthetic construct
  REGION 1..18: note = GFR-binding peptide
  VARIANT 4..5: note = Xaa is C or S
PKAXXVPTELEPISMLYL

SEQ ID NO: 2978 - protein, 18 aa, synthetic construct
  REGION 1..18: note = GFR-binding peptide
  VARIANT 4..5: note = Xaa is C or S
ASPXXVSQDLEPISILYL

SEQ ID NO: 2979 - protein, 13 aa, synthetic construct
  REGION 1..13: note = GFR-binding peptide
VPQDLSPISILYI

SEQ ID NO: 2980 - protein, 19 aa, synthetic construct
  REGION 1..19: note = GFR-binding peptide
  VARIANT 5..6: note = Xaa is C or S
IPKAXXVPTELSPISMLYI

SEQ ID NO: 2981 - protein, 19 aa, synthetic construct
  REGION 1..19: note = GFR-binding peptide
  VARIANT 5..6: note = Xaa is C or S
SAAPXXVPQALNAISILYF

SEQ ID NO: 2982 - protein, 10 aa, synthetic construct
  REGION 1..10: note = GFR-binding peptide
ELEPISMLYL

SEQ ID NO: 2983 - protein, 13 aa, synthetic construct
  REGION 1..13: note = GFR-binding peptide
VPQDLSPISILYK

SEQ ID NO: 2984 - protein, 19 aa, synthetic construct
  REGION 1..19: note = GFR-binding peptide
  VARIANT 5..6: note = Xaa is C or S
IPKAXXVPTELSPISMLYK

SEQ ID NO: 2985 - protein, 17 aa, synthetic construct
  REGION 1..17: note = GFR-binding peptide
  VARIANT 3..4: note = Xaa is C or S
ASXXVPARLSPISILYK

SEQ ID NO: 2986 - protein, 14 aa, synthetic construct
  REGION 1..14: note = GFR-binding peptide
  VARIANT 1: note = Xaa is C or S
XAPTQLSPISVLYI

SEQ ID NO: 2987 - protein, 14 aa, synthetic construct
  REGION 1..14: note = GFR-binding peptide
  VARIANT 1: note = Xaa is C or S
XAPTQLSPISVLYK

SEQ ID NO: 2988 - protein, 12 aa, synthetic construct
  REGION 1..12: note = GFR-binding peptide
PTELNAISMLYF

SEQ ID NO: 2989 - protein, 12 aa, synthetic construct
  REGION 1..12: note = GFR-binding peptide
PQALEPISILYL

SEQ ID NO: 2990 - protein, 12 aa, synthetic construct
  REGION 1..12: note = GFR-binding peptide
PTKLSPISILYK

SEQ ID NO: 2991 - protein, 16 aa, synthetic construct
  REGION 1..16: note = GFR-binding peptide
  VARIANT 2..3: note = Xaa is C or S
AXXVPTELSPISMLYI

SEQ ID NO: 2992 - protein, 15 aa, synthetic construct
  REGION 1..15: note = GFR-binding peptide
  VARIANT 1..2: note = Xaa is C or S
XXVPTKLSPISVLYI

SEQ ID NO: 2993 - protein, 16 aa, synthetic construct
  REGION 1..16: note = GFR-binding peptide
  VARIANT 2..3: note = Xaa is C or S
AXXVPTELSPISMLYK

SEQ ID NO: 2994 - protein, 13 aa, synthetic construct
  REGION 1..13: note = GFR-binding peptide
VPTELSPISMLYK

SEQ ID NO: 2995 - protein, 11 aa, synthetic construct
  REGION 1..11: note = GFR-binding peptide
ARLSPISILYK

SEQ ID NO: 2996 - protein, 13 aa, synthetic construct
  REGION 1..13: note = GFR-binding peptide
VPTKLNAISVLYF

SEQ ID NO: 2997 - protein, 14 aa, synthetic construct
  REGION 1..14: note = GFR-binding peptide
  VARIANT 1: note = Xaa is C or S
XVSQDLSPISILYK

SEQ ID NO: 2998 - protein, 19 aa, synthetic construct
  REGION 1..19: note = GFR-binding peptide
  VARIANT 5..6: note = Xaa is C or S
VPKAXXAPTKLNAISVLYF

SEQ ID NO: 2999 - protein, 14 aa, synthetic construct
  REGION 1..14: note = GFR-binding peptide
  VARIANT 1: note = Xaa is C or S
XVSQDLSPISILYI

SEQ ID NO: 3000 - protein, 13 aa, synthetic construct
  REGION 1..13: note = GFR-binding peptide
VPTELSPISMLYI

SEQ ID NO: 3001 - protein, 12 aa, synthetic construct
  REGION 1..12: note = GFR-binding peptide
PQDLNAISILYF

SEQ ID NO: 3002 - protein, 19 aa, synthetic construct
  REGION 1..19: note = GFR-binding peptide
  VARIANT 5..6: note = Xaa is C or S
IPKAXXVPTELNAISMLYF

SEQ ID NO: 3003 - protein, 18 aa, synthetic construct
  REGION 1..18: note = GFR-binding peptide
  VARIANT 4..5: note = Xaa is C or S
PKPXXAPTKLEPISVLYL

SEQ ID NO: 3004 - protein, 20 aa, synthetic construct
  REGION 1..20: note = GFR-binding peptide
  VARIANT 6..7: note = Xaa is C or S
SIPKAXXVPTELSPISMLYI

SEQ ID NO: 3005 - protein, 20 aa, synthetic construct
  REGION 1..20: note = GFR-binding peptide
  VARIANT 6..7: note = Xaa is C or S
SIPKAXXVPTELSPISMLYK

SEQ ID NO: 3006 - protein, 19 aa, synthetic construct
  REGION 1..19: note = GFR-binding peptide
  VARIANT 5..6: note = Xaa is C or S
SASPXXVPQDLNAISILYF

SEQ ID NO: 3007 - protein, 13 aa, synthetic construct
  REGION 1..13: note = GFR-binding peptide
VPTKLSPISVLYI

SEQ ID NO: 3008 - protein, 20 aa, synthetic construct
  REGION 1..20: note = GFR-binding peptide
  VARIANT 6..7: note = Xaa is C or S
SIPKAXXVPTELNAISMLYF

SEQ ID NO: 3009 - protein, 19 aa, synthetic construct
  REGION 1..19: note = GFR-binding peptide
  VARIANT 5..6: note = Xaa is C or S
VPKAXXAPTKLSPISVLYK

SEQ ID NO: 3010 - protein, 19 aa, synthetic construct
  REGION 1..19: note = GFR-binding peptide
  VARIANT 5..6: note = Xaa is C or S
VPKAXXAPTKLSPISVLYI

SEQ ID NO: 3011 - protein, 18 aa, synthetic construct
  REGION 1..18: note = GFR-binding peptide
  VARIANT 4..5: note = Xaa is C or S
GKAXXVPTKLEPISVLYL

SEQ ID NO: 3012 - protein, 16 aa, synthetic construct
  REGION 1..16: note = GFR-binding peptide
  VARIANT 2..3: note = Xaa is C or S
AXXVPTELNAISMLYF

SEQ ID NO: 3013 - protein, 11 aa, synthetic construct
  REGION 1..11: note = GFR-binding peptide
ARLNAISILYF

SEQ ID NO: 3014 - protein, 19 aa, synthetic construct
  REGION 1..19: note = GFR-binding peptide
  VARIANT 5..6: note = Xaa is C or S
SASPXXVPQDLSPISILYI

SEQ ID NO: 3015 - protein, 16 aa, synthetic construct
  REGION 1..16: note = GFR-binding peptide
  VARIANT 2..3: note = Xaa is C or S
AXXVPTKLSPISILYI

SEQ ID NO: 3016 - protein, 19 aa, synthetic construct
  REGION 1..19: note = GFR-binding peptide
  VARIANT 5..6: note = Xaa is C or S
SASPXXVPQDLSPISILYK

SEQ ID NO: 3017 - protein, 20 aa, synthetic construct
  REGION 1..20: note = GFR-binding peptide
  VARIANT 6..7: note = Xaa is C or S
KASKAXXVPTKLNAISILYF

SEQ ID NO: 3018 - protein, 9 aa, synthetic construct
  REGION 1..9: note = GFR-binding peptide
LNAISMLYF

SEQ ID NO: 3019 - protein, 16 aa, synthetic construct
  REGION 1..16: note = GFR-binding peptide
  VARIANT 2..3: note = Xaa is C or S
AXXVPTKLSPISILYK

SEQ ID NO: 3020 - protein, 20 aa, synthetic construct
  REGION 1..20: note = GFR-binding peptide
  VARIANT 6..7: note = Xaa is C or S
YVPKPXXAPTKLSPISVLYI

SEQ ID NO: 3021 - protein, 13 aa, synthetic construct
  REGION 1..13: note = GFR-binding peptide
VPQALEPISILYL

SEQ ID NO: 3022 - protein, 16 aa, synthetic construct
  REGION 1..16: note = GFR-binding peptide
  VARIANT 2..3: note = Xaa is C or S
AXXAPTKLNAISVLYF

SEQ ID NO: 3023 - protein, 16 aa, synthetic construct
  REGION 1..16: note = GFR-binding peptide
  VARIANT 2..3: note = Xaa is C or S
AXXVPTKLNAISILYF

SEQ ID NO: 3024 - protein, 11 aa, synthetic construct
  REGION 1..11: note = GFR-binding peptide
TELEPISMLYL

SEQ ID NO: 3025 - protein, 15 aa, synthetic construct
  REGION 1..15: note = GFR-binding peptide
  VARIANT 1..2: note = Xaa is C or S
XXVPARLEPISILYL

SEQ ID NO: 3026 - protein, 15 aa, synthetic construct
  REGION 1..15: note = GFR-binding peptide
  VARIANT 1..2: note = Xaa is C or S
XXVPTKLNAISVLYF

SEQ ID NO: 3027 - protein, 18 aa, synthetic construct
  REGION 1..18: note = GFR-binding peptide
  VARIANT 4..5: note = Xaa is C or S
PKAXXAPTKLEPISVLYL

SEQ ID NO: 3028 - protein, 12 aa, synthetic construct
  REGION 1..12: note = GFR-binding peptide
PARLEPISILYL

SEQ ID NO: 3029 - protein, 11 aa, synthetic construct
  REGION 1..11: note = GFR-binding peptide
TQLSPISVLYI

SEQ ID NO: 3030 - protein, 11 aa, synthetic construct
  REGION 1..11: note = GFR-binding peptide
TQLSPISVLYK

SEQ ID NO: 3031 - protein, 19 aa, synthetic construct
  REGION 1..19: note = GFR-binding peptide
  VARIANT 5..6: note = Xaa is C or S
ASKAXXVPTKLSPISILYK

SEQ ID NO: 3032 - protein, 19 aa, synthetic construct
  REGION 1..19: note = GFR-binding peptide
  VARIANT 5..6: note = Xaa is C or S
ASKAXXVPTKLSPISILYI

SEQ ID NO: 3033 - protein, 17 aa, synthetic construct
  REGION 1..17: note = GFR-binding peptide
  VARIANT 3..4: note = Xaa is C or S
ASXXVPARLNAISILYF

SEQ ID NO: 3034 - protein, 19 aa, synthetic construct
  REGION 1..19: note = GFR-binding peptide
  VARIANT 5..6: note = Xaa is C or S
VPKPXXAPTQLSPISVLYK

SEQ ID NO: 3035 - protein, 19 aa, synthetic construct
  REGION 1..19: note = GFR-binding peptide
  VARIANT 5..6: note = Xaa is C or S
VPKPXXAPTQLSPISVLYI

SEQ ID NO: 3036 - protein, 11 aa, synthetic construct
  REGION 1..11: note = GFR-binding peptide
QDLEPISILYL

SEQ ID NO: 3037 - protein, 19 aa, synthetic construct
  REGION 1..19: note = GFR-binding peptide
  VARIANT 5..6: note = Xaa is C or S
ASKAXXVPTKLNAISILYF

SEQ ID NO: 3038 - protein, 18 aa, synthetic construct
  REGION 1..18: note = GFR-binding peptide
  VARIANT 4..5: note = Xaa is C or S
AAPXXVPQALNAISILYF

SEQ ID NO: 3039 - protein, 16 aa, synthetic construct
  REGION 1..16: note = GFR-binding peptide
  VARIANT 2..3: note = Xaa is C or S
AXXAPTKLSPISVLYK

SEQ ID NO: 3040 - protein, 12 aa, synthetic construct
  REGION 1..12: note = GFR-binding peptide
SQDLEPISILYL

SEQ ID NO: 3041 - protein, 16 aa, synthetic construct
  REGION 1..16: note = GFR-binding peptide
  VARIANT 3: note = Xaa is C or S
PTXAPTKLSPISVLYK

SEQ ID NO: 3042 - protein, 16 aa, synthetic construct
  REGION 1..16: note = GFR-binding peptide
  VARIANT 2..3: note = Xaa is C or S
AXXAPTKLSPISVLYI

SEQ ID NO: 3043 - protein, 15 aa, synthetic construct
  REGION 1..15: note = GFR-binding peptide
  VARIANT 1..2: note = Xaa is C or S
XXVSQDLNAISILYF

SEQ ID NO: 3044 - protein, 9 aa, synthetic construct
  REGION 1..9: note = GFR-binding peptide
LSPISVLYI

SEQ ID NO: 3045 - protein, 19 aa, synthetic construct
  REGION 1..19: note = GFR-binding peptide
  VARIANT 5..6: note = Xaa is C or S
VPKPXXAPTKLSPISVLYK

SEQ ID NO: 3046 - protein, 12 aa, synthetic construct
  REGION 1..12: note = GFR-binding peptide
PTKLNAISILYF

SEQ ID NO: 3047 - protein, 19 aa, synthetic construct
  REGION 1..19: note = GFR-binding peptide
  VARIANT 5..6: note = Xaa is C or S
VPKPXXAPTKLSPISVLYI

SEQ ID NO: 3048 - protein, 17 aa, synthetic construct
  REGION 1..17: note = GFR-binding peptide
  VARIANT 3..4: note = Xaa is C or S
KAXXVPTKLSPISVLYI

SEQ ID NO: 3049 - protein, 16 aa, synthetic construct
  REGION 1..16: note = GFR-binding peptide
  VARIANT 3: note = Xaa is C or S
PTXAPTKLSPISVLYI

SEQ ID NO: 3050 - protein, 10 aa, synthetic construct
  REGION 1..10: note = GFR-binding peptide
ALEPISILYL

SEQ ID NO: 3051 - protein, 16 aa, synthetic construct
  REGION 1..16: note = GFR-binding peptide
  VARIANT 2..3: note = Xaa is C or S
PXXVPQDLSPISILYI

SEQ ID NO: 3052 - protein, 11 aa, synthetic construct
  REGION 1..11: note = GFR-binding peptide
QALNAISILYF

SEQ ID NO: 3053 - protein, 20 aa, synthetic construct
  REGION 1..20: note = GFR-binding peptide
  VARIANT 6..7: note = Xaa is C or S
ASASPXXVSQDLNAISILYF

SEQ ID NO: 3054 - protein, 10 aa, synthetic construct
  REGION 1..10: note = GFR-binding peptide
QLSPISVLYI

SEQ ID NO: 3055 - protein, 10 aa, synthetic construct
  REGION 1..10: note = GFR-binding peptide
QLSPISVLYK

SEQ ID NO: 3056 - protein, 13 aa, synthetic construct
  REGION 1..13: note = GFR-binding peptide
VSQDLNAISILYF

SEQ ID NO: 3057 - protein, 16 aa, synthetic construct
  REGION 1..16: note = GFR-binding peptide
  VARIANT 2..3: note = Xaa is C or S
PXXVPQDLSPISILYK

SEQ ID NO: 3058 - protein, 15 aa, synthetic construct
  REGION 1..15: note = GFR-binding peptide
  VARIANT 1..2: note = Xaa is C or S
XXVPQALEPISILYL

SEQ ID NO: 3059 - protein, 13 aa, synthetic construct
  REGION 1..13: note = GFR-binding peptide
VSQDLSPISILYI

SEQ ID NO: 3060 - protein, 15 aa, synthetic construct
  REGION 1..15: note = GFR-binding peptide
  VARIANT 1..2: note = Xaa is C or S
XXVSQDLSPISILYK

SEQ ID NO: 3061 - protein, 15 aa, synthetic construct
  REGION 1..15: note = GFR-binding peptide
  VARIANT 1..2: note = Xaa is C or S
XXVSQDLSPISILYI

SEQ ID NO: 3062 - protein, 18 aa, synthetic construct
  REGION 1..18: note = GFR-binding peptide
  VARIANT 4..5: note = Xaa is C or S
ASPXXVPQDLNAISILYF

SEQ ID NO: 3063 - protein, 18 aa, synthetic construct
  REGION 1..18: note = GFR-binding peptide
  VARIANT 4..5: note = Xaa is C or S
PASXXVPARLSPISILYK

SEQ ID NO: 3064 - protein, 11 aa, synthetic construct
  REGION 1..11: note = GFR-binding peptide
QALSPISILYK

SEQ ID NO: 3065 - protein, 20 aa, synthetic construct
  REGION 1..20: note = GFR-binding peptide
  VARIANT 6..7: note = Xaa is C or S
ASASPXXVSQDLSPISILYK

SEQ ID NO: 3066 - protein, 17 aa, synthetic construct
  REGION 1..17: note = GFR-binding peptide
  VARIANT 4: note = Xaa is C or S
KPTXAPTKLSPISVLYK

SEQ ID NO: 3067 - protein, 11 aa, synthetic construct
  REGION 1..11: note = GFR-binding peptide
QALSPISILYI

SEQ ID NO: 3068 - protein, 17 aa, synthetic construct
  REGION 1..17: note = GFR-binding peptide
  VARIANT 4: note = Xaa is C or S
KPTXAPTKLSPISVLYI

SEQ ID NO: 3069 - protein, 13 aa, synthetic construct
  REGION 1..13: note = GFR-binding peptide
VSQDLSPISILYK

SEQ ID NO: 3070 - protein, 16 aa, synthetic construct
  REGION 1..16: note = GFR-binding peptide
  VARIANT 2..3: note = Xaa is C or S
PXXVPQDLNAISILYF

SEQ ID NO: 3071 - protein, 9 aa, synthetic construct
  REGION 1..9: note = GFR-binding peptide
LSPISILYK

SEQ ID NO: 3072 - protein, 20 aa, synthetic construct
  REGION 1..20: note = GFR-binding peptide
  VARIANT 6..7: note = Xaa is C or S
AVPKAXXAPTKLEPISVLYL

SEQ ID NO: 3073 - protein, 15 aa, synthetic construct
  REGION 1..15: note = GFR-binding peptide
  VARIANT 1..2: note = Xaa is C or S
XXVPQALSPISILYK

SEQ ID NO: 3074 - protein, 16 aa, synthetic construct
  REGION 1..16: note = GFR-binding peptide
  VARIANT 2..3: note = Xaa is C or S
PXXAPTQLSPISVLYK

SEQ ID NO: 3075 - protein, 16 aa, synthetic construct
  REGION 1..16: note = GFR-binding peptide
  VARIANT 2..3: note = Xaa is C or S
PXXAPTQLSPISVLYI

SEQ ID NO: 3076 - protein, 18 aa, synthetic construct
  REGION 1..18: note = GFR-binding peptide
  VARIANT 4..5: note = Xaa is C or S
AAPXXVPQALEPISILYL

SEQ ID NO: 3077 - protein, 15 aa, synthetic construct
  REGION 1..15: note = GFR-binding peptide
  VARIANT 1..2: note = Xaa is C or S
XXVPQALSPISILYI

SEQ ID NO: 3078 - protein, 12 aa, synthetic construct
  REGION 1..12: note = GFR-binding peptide
PTKLEPISVLYL

SEQ ID NO: 3079 - protein, 15 aa, synthetic construct
  REGION 1..15: note = GFR-binding peptide
  VARIANT 1..2: note = Xaa is C or S
XXVPTKLSPISILYI

SEQ ID NO: 3080 - protein, 15 aa, synthetic construct
  REGION 1..15: note = GFR-binding peptide
  VARIANT 1..2: note = Xaa is C or S
XXVPTKLSPISILYK

SEQ ID NO: 3081 - protein, 19 aa, synthetic construct
  REGION 1..19: note = GFR-binding peptide
  VARIANT 5..6: note = Xaa is C or S
SASPXXVSQDLNAISILYF

SEQ ID NO: 3082 - protein, 17 aa, synthetic construct
  REGION 1..17: note = GFR-binding peptide
  VARIANT 3..4: note = Xaa is C or S
SPXXVPQDLEPISILYL

SEQ ID NO: 3083 - protein, 18 aa, synthetic construct
  REGION 1..18: note = GFR-binding peptide
  VARIANT 4..5: note = Xaa is C or S
AAPXXVPQALSPISILYK

SEQ ID NO: 3084 - protein, 14 aa, synthetic construct
  REGION 1..14: note = GFR-binding peptide
  VARIANT 1: note = Xaa is C or S
XVPARLEPISILYL

SEQ ID NO: 3085 - protein, 18 aa, synthetic construct
  REGION 1..18: note = GFR-binding peptide
  VARIANT 4..5: note = Xaa is C or S
AAPXXVPQALSPISILYI

SEQ ID NO: 3086 - protein, 14 aa, synthetic construct
  REGION 1..14: note = GFR-binding peptide
  VARIANT 1: note = Xaa is C or S
XVPTELEPISMLYL

SEQ ID NO: 3087 - protein, 16 aa, synthetic construct
  REGION 1..16: note = GFR-binding peptide
  VARIANT 2..3: note = Xaa is C or S
PXXVPQALNAISILYF

SEQ ID NO: 3088 - protein, 16 aa, synthetic construct
  REGION 1..16: note = GFR-binding peptide
  VARIANT 2..3: note = Xaa is C or S
PXXVSQDLEPISILYL

SEQ ID NO: 3089 - protein, 14 aa, synthetic construct
  REGION 1..14: note = GFR-binding peptide
  VARIANT 1: note = Xaa is C or S
XAPTKLSPISVLYK

SEQ ID NO: 3090 - protein, 14 aa, synthetic construct
  REGION 1..14: note = GFR-binding peptide
  VARIANT 1: note = Xaa is C or S
XAPTKLSPISVLYI

SEQ ID NO: 3091 - protein, 16 aa, synthetic construct
  REGION 1..16: note = GFR-binding peptide
  VARIANT 2..3: note = Xaa is C or S
PXXVPQALEPISILYL

SEQ ID NO: 3092 - protein, 18 aa, synthetic construct
  REGION 1..18: note = GFR-binding peptide
  VARIANT 4..5: note = Xaa is C or S
PKPXXAPTQLSPISVLYI

SEQ ID NO: 3093 - protein, 10 aa, synthetic construct
  REGION 1..10: note = GFR-binding peptide
KLNAISILYF

SEQ ID NO: 3094 - protein, 18 aa, synthetic construct
  REGION 1..18: note = GFR-binding peptide
  VARIANT 4..5: note = Xaa is C or S
PKPXXAPTQLSPISVLYK

SEQ ID NO: 3095 - protein, 13 aa, synthetic construct
  REGION 1..13: note = GFR-binding peptide
APTQLSPISVLYI

SEQ ID NO: 3096 - protein, 13 aa, synthetic construct
  REGION 1..13: note = GFR-binding peptide
APTQLSPISVLYK

SEQ ID NO: 3097 - protein, 13 aa, synthetic construct
  REGION 1..13: note = GFR-binding peptide
VPTKLSPISILYI

SEQ ID NO: 3098 - protein, 10 aa, synthetic construct
  REGION 1..10: note = GFR-binding peptide
ALSPISILYI

SEQ ID NO: 3099 - protein, 13 aa, synthetic construct
  REGION 1..13: note = GFR-binding peptide
VPTKLSPISILYK

SEQ ID NO: 3100 - protein, 14 aa, synthetic construct
  REGION 1..14: note = GFR-binding peptide
  VARIANT 1: note = Xaa is C or S
XVPTKLEPISVLYL

SEQ ID NO: 3101 - protein, 10 aa, synthetic construct
  REGION 1..10: note = GFR-binding peptide
ALSPISILYK

SEQ ID NO: 3102 - protein, 16 aa, synthetic construct
  REGION 1..16: note = GFR-binding peptide
  VARIANT 2..3: note = Xaa is C or S
AXXAPTKLEPISVLYL

SEQ ID NO: 3103 - protein, 17 aa, synthetic construct
  REGION 1..17: note = GFR-binding peptide
  VARIANT 3..4: note = Xaa is C or S
KAXXAPTKLSPISVLYK

SEQ ID NO: 3104 - protein, 10 aa, synthetic construct
  REGION 1..10: note = GFR-binding peptide
RLSPISILYK

SEQ ID NO: 3105 - protein, 17 aa, synthetic construct
  REGION 1..17: note = GFR-binding peptide
  VARIANT 3..4: note = Xaa is C or S
KAXXAPTKLSPISVLYI

SEQ ID NO: 3106 - protein, 13 aa, synthetic construct
  REGION 1..13: note = GFR-binding peptide
VPQALSPISILYI

SEQ ID NO: 3107 - protein, 12 aa, synthetic construct
  REGION 1..12: note = GFR-binding peptide
PQDLSPISILYK

SEQ ID NO: 3108 - protein, 13 aa, synthetic construct
  REGION 1..13: note = GFR-binding peptide
VPQALSPISILYK

SEQ ID NO: 3109 - protein, 15 aa, synthetic construct
  REGION 1..15: note = GFR-binding peptide
  VARIANT 1..2: note = Xaa is C or S
XXAPTQLSPISVLYI

SEQ ID NO: 3110 - protein, 15 aa, synthetic construct
  REGION 1..15: note = GFR-binding peptide
  VARIANT 1..2: note = Xaa is C or S
XXAPTQLSPISVLYK

SEQ ID NO: 3111 - protein, 12 aa, synthetic construct
  REGION 1..12: note = GFR-binding peptide
PQDLSPISILYI

SEQ ID NO: 3112 - protein, 15 aa, synthetic construct
  REGION 1..15: note = GFR-binding peptide
  VARIANT 1..2: note = Xaa is C or S
XXVPTELNAISMLYF

SEQ ID NO: 3113 - protein, 15 aa, synthetic construct
  REGION 1..15: note = GFR-binding peptide
  VARIANT 1..2: note = Xaa is C or S
XXVSQDLEPISILYL

SEQ ID NO: 3114 - protein, 14 aa, synthetic construct
  REGION 1..14: note = GFR-binding peptide
  VARIANT 1: note = Xaa is C or S
XVPQDLSPISILYI

SEQ ID NO: 3115 - protein, 13 aa, synthetic construct
  REGION 1..13: note = GFR-binding peptide
VSQDLEPISILYL

SEQ ID NO: 3116 - protein, 14 aa, synthetic construct
  REGION 1..14: note = GFR-binding peptide
  VARIANT 1: note = Xaa is C or S
XVPQDLSPISILYK

SEQ ID NO: 3117 - protein, 18 aa, synthetic construct
  REGION 1..18: note = GFR-binding peptide
  VARIANT 4..5: note = Xaa is C or S
PASXXVPARLEPISILYL

SEQ ID NO: 3118 - protein, 19 aa, synthetic construct
  REGION 1..19: note = GFR-binding peptide
  VARIANT 6: note = Xaa is C or S
VTKPTXAPTKLSPISVLYI

SEQ ID NO: 3119 - protein, 19 aa, synthetic construct
  REGION 1..19: note = GFR-binding peptide
  VARIANT 6: note = Xaa is C or S
VTKPTXAPTKLSPISVLYK

SEQ ID NO: 3120 - protein, 18 aa, synthetic construct
  REGION 1..18: note = GFR-binding peptide
  VARIANT 5: note = Xaa is C or S
TKPTXAPTKLSPISVLYI

SEQ ID NO: 3121 - protein, 18 aa, synthetic construct
  REGION 1..18: note = GFR-binding peptide
  VARIANT 4..5: note = Xaa is C or S
PKAXXAPTKLSPISVLYK

SEQ ID NO: 3122 - protein, 18 aa, synthetic construct
  REGION 1..18: note = GFR-binding peptide
  VARIANT 4..5: note = Xaa is C or S
PKAXXAPTKLSPISVLYI

SEQ ID NO: 3123 - protein, 10 aa, synthetic construct
  REGION 1..10: note = GFR-binding peptide
QLEPISVLYL

SEQ ID NO: 3124 - protein, 15 aa, synthetic construct
  REGION 1..15: note = GFR-binding peptide
  VARIANT 1..2: note = Xaa is C or S
XXVPQDLSPISILYI

SEQ ID NO: 3125 - protein, 15 aa, synthetic construct
  REGION 1..15: note = GFR-binding peptide
  VARIANT 1..2: note = Xaa is C or S
XXVPQDLSPISILYK

SEQ ID NO: 3126 - protein, 13 aa, synthetic construct
  REGION 1..13: note = GFR-binding peptide
VPTELNAISMLYF

SEQ ID NO: 3127 - protein, 20 aa, synthetic construct
  REGION 1..20: note = GFR-binding peptide
  VARIANT 6..7: note = Xaa is C or S
ASAAPXXVPQALSPISILYK

SEQ ID NO: 3128 - protein, 20 aa, synthetic construct
  REGION 1..20: note = GFR-binding peptide
  VARIANT 6..7: note = Xaa is C or S
KIPKAXXVPTELSPISMLYK

SEQ ID NO: 3129 - protein, 20 aa, synthetic construct
  REGION 1..20: note = GFR-binding peptide
  VARIANT 6..7: note = Xaa is C or S
KIPKAXXVPTELSPISMLYI

SEQ ID NO: 3130 - protein, 16 aa, synthetic construct
  REGION 1..16: note = GFR-binding peptide
  VARIANT 2..3: note = Xaa is C or S
AXXVPTKLSPISVLYI

SEQ ID NO: 3131 - protein, 18 aa, synthetic construct
  REGION 1..18: note = GFR-binding peptide
  VARIANT 4..5: note = Xaa is C or S
SKAXXVPTKLNAISILYF

SEQ ID NO: 3132 - protein, 12 aa, synthetic construct
  REGION 1..12: note = GFR-binding peptide
SQDLSPISILYI

SEQ ID NO: 3133 - protein, 19 aa, synthetic construct
  REGION 1..19: note = GFR-binding peptide
  VARIANT 5..6: note = Xaa is C or S
SASPXXVSQDLEPISILYL

SEQ ID NO: 3134 - protein, 12 aa, synthetic construct
  REGION 1..12: note = GFR-binding peptide
SQDLSPISILYK

SEQ ID NO: 3135 - protein, 17 aa, synthetic construct
  REGION 1..17: note = GFR-binding peptide
  VARIANT 3..4: note = Xaa is C or S
KPXXAPTKLSPISVLYI

SEQ ID NO: 3136 - protein, 17 aa, synthetic construct
  REGION 1..17: note = GFR-binding peptide
  VARIANT 3..4: note = Xaa is C or S
KPXXAPTKLSPISVLYK

SEQ ID NO: 3137 - protein, 17 aa, synthetic construct
  REGION 1..17: note = GFR-binding peptide
  VARIANT 3..4: note = Xaa is C or S
KPXXAPTQLSPISVLYI

SEQ ID NO: 3138 - protein, 12 aa, synthetic construct
  REGION 1..12: note = GFR-binding peptide
PTELEPISMLYL

SEQ ID NO: 3139 - protein, 17 aa, synthetic construct
  REGION 1..17: note = GFR-binding peptide
  VARIANT 3..4: note = Xaa is C or S
KPXXAPTQLSPISVLYK

SEQ ID NO: 3140 - protein, 16 aa, synthetic construct
  REGION 1..16: note = GFR-binding peptide
  VARIANT 2..3: note = Xaa is C or S
PXXVSQDLNAISILYF

SEQ ID NO: 3141 - protein, 14 aa, synthetic construct
  REGION 1..14: note = GFR-binding peptide
  VARIANT 1: note = Xaa is C or S
XVPQALSPISILYK

SEQ ID NO: 3142 - protein, 14 aa, synthetic construct
  REGION 1..14: note = GFR-binding peptide
  VARIANT 1: note = Xaa is C or S
XVPARLNAISILYF

SEQ ID NO: 3143 - protein, 14 aa, synthetic construct
  REGION 1..14: note = GFR-binding peptide
  VARIANT 1: note = Xaa is C or S
XVPTELNAISMLYF

SEQ ID NO: 3144 - protein, 14 aa, synthetic construct
  REGION 1..14: note = GFR-binding peptide
  VARIANT 1: note = Xaa is C or S
XVPQALSPISILYI

SEQ ID NO: 3145 - protein, 20 aa, synthetic construct
  REGION 1..20: note = GFR-binding peptide
  VARIANT 6..7: note = Xaa is C or S
ASASPXXVPQDLNAISILYF

SEQ ID NO: 3146 - protein, 19 aa, synthetic construct
  REGION 1..19: note = GFR-binding peptide
  VARIANT 5..6: note = Xaa is C or S
VGKAXXVPTKLSPISVLYI

SEQ ID NO: 3147 - protein, 18 aa, synthetic construct
  REGION 1..18: note = GFR-binding peptide
  VARIANT 5: note = Xaa is C or S
TKPTXAPTKLSPISVLYK

SEQ ID NO: 3148 - protein, 18 aa, synthetic construct
  REGION 1..18: note = GFR-binding peptide
  VARIANT 4..5: note = Xaa is C or S
PKPXXAPTKLSPISVLYK

SEQ ID NO: 3149 - protein, 14 aa, synthetic construct
  REGION 1..14: note = GFR-binding peptide
  VARIANT 1: note = Xaa is C or S
XVPTKLNAISVLYF

SEQ ID NO: 3150 - protein, 18 aa, synthetic construct
  REGION 1..18: note = GFR-binding peptide
  VARIANT 4..5: note = Xaa is C or S
PKPXXAPTKLSPISVLYI

SEQ ID NO: 3151 - protein, 10 aa, synthetic construct
  REGION 1..10: note = GFR-binding peptide
DLSPISILYK

SEQ ID NO: 3152 - protein, 19 aa, synthetic construct
  REGION 1..19: note = GFR-binding peptide
  VARIANT 5..6: note = Xaa is C or S
IPKAXXVPTELEPISMLYL

SEQ ID NO: 3153 - protein, 10 aa, synthetic construct
  REGION 1..10: note = GFR-binding peptide
DLSPISILYI

SEQ ID NO: 3154 - protein, 13 aa, synthetic construct
  REGION 1..13: note = GFR-binding peptide
APTKLSPISVLYK

SEQ ID NO: 3155 - protein, 20 aa, synthetic construct
  REGION 1..20: note = GFR-binding peptide
  VARIANT 7: note = Xaa is C or S
HVTKPTXAPTKLSPISVLYI

SEQ ID NO: 3156 - protein, 13 aa, synthetic construct
  REGION 1..13: note = GFR-binding peptide
APTKLSPISVLYI

SEQ ID NO: 3157 - protein, 20 aa, synthetic construct
  REGION 1..20: note = GFR-binding peptide
  VARIANT 6..7: note = Xaa is C or S
YVPKPXXAPTKLEPISVLYL

SEQ ID NO: 3158 - protein, 11 aa, synthetic construct
  REGION 1..11: note = GFR-binding peptide
TKLSPISILYK

SEQ ID NO: 3159 - protein, 17 aa, synthetic construct
  REGION 1..17: note = GFR-binding peptide
  VARIANT 3..4: note = Xaa is C or S
KAXXVPTKLSPISILYK

SEQ ID NO: 3160 - protein, 17 aa, synthetic construct
  REGION 1..17: note = GFR-binding peptide
  VARIANT 3..4: note = Xaa is C or S
KAXXVPTKLSPISILYI

SEQ ID NO: 3161 - protein, 12 aa, synthetic construct
  REGION 1..12: note = GFR-binding peptide
PTQLEPISVLYL

SEQ ID NO: 3162 - protein, 11 aa, synthetic construct
  REGION 1..11: note = GFR-binding peptide
TKLSPISILYI

SEQ ID NO: 3163 - protein, 10 aa, synthetic construct
  REGION 1..10: note = GFR-binding peptide
KLEPISVLYL

SEQ ID NO: 3164 - protein, 17 aa, synthetic construct
  REGION 1..17: note = GFR-binding peptide
  VARIANT 3..4: note = Xaa is C or S
SPXXVSQDLNAISILYF

SEQ ID NO: 3165 - protein, 16 aa, synthetic construct
  REGION 1..16: note = GFR-binding peptide
  VARIANT 2..3: note = Xaa is C or S
AXXVPTELSPINMLYF

SEQ ID NO: 3166 - protein, 13 aa, synthetic construct
  REGION 1..13: note = GFR-binding peptide
APTKLSPINVLYF

SEQ ID NO: 3167 - protein, 14 aa, synthetic construct
  REGION 1..14: note = GFR-binding peptide
  VARIANT 1: note = Xaa is C or S
XVPTKLSPINILYF

SEQ ID NO: 3168 - protein, 16 aa, synthetic construct
  REGION 1..16: note = GFR-binding peptide
  VARIANT 2..3: note = Xaa is C or S
SXXVPARLSPINILYF

SEQ ID NO: 3169 - protein, 15 aa, synthetic construct
  REGION 1..15: note = GFR-binding peptide
  VARIANT 1..2: note = Xaa is C or S
XXAPVKTSPINMLYF

SEQ ID NO: 3170 - protein, 14 aa, synthetic construct
  REGION 1..14: note = GFR-binding peptide
  VARIANT 1: note = Xaa is C or S
XAPTQLSPINVLYF

SEQ ID NO: 3171 - protein, 19 aa, synthetic construct
  REGION 1..19: note = GFR-binding peptide
  VARIANT 5..6: note = Xaa is C or S
IPKAXXVPTELSPINMLYF

SEQ ID NO: 3172 - protein, 13 aa, synthetic construct
  REGION 1..13: note = GFR-binding peptide
VPTRLSPINILYF

SEQ ID NO: 3173 - protein, 20 aa, synthetic construct
  REGION 1..20: note = GFR-binding peptide
  VARIANT 6..7: note = Xaa is C or S
AAPASXXVPARLSPINILYF

SEQ ID NO: 3174 - protein, 13 aa, synthetic construct
  REGION 1..13: note = GFR-binding peptide
VPTKLSPINVLYF

SEQ ID NO: 3175 - protein, 17 aa, synthetic construct
  REGION 1..17: note = GFR-binding peptide
  VARIANT 3..4: note = Xaa is C or S
KAXXAPTKLSPINVLYF

SEQ ID NO: 3176 - protein, 10 aa, synthetic construct
  REGION 1..10: note = GFR-binding peptide
QLSPINVLYF

SEQ ID NO: 3177 - protein, 10 aa, synthetic construct
  REGION 1..10: note = GFR-binding peptide
RLSPINILYF

SEQ ID NO: 3178 - protein, 10 aa, synthetic construct
  REGION 1..10: note = GFR-binding peptide
KLSPINVLYF

SEQ ID NO: 3179 - protein, 15 aa, synthetic construct
  REGION 1..15: note = GFR-binding peptide
  VARIANT 1..2: note = Xaa is C or S
XXVPTELSPINMLYF

SEQ ID NO: 3180 - protein, 16 aa, synthetic construct
  REGION 1..16: note = GFR-binding peptide
  VARIANT 2..3: note = Xaa is C or S
TXXVPTRLSPINILYF

SEQ ID NO: 3181 - protein, 14 aa, synthetic construct
  REGION 1..14: note = GFR-binding peptide
  VARIANT 1: note = Xaa is C or S
XVPTRLSPINILYF

SEQ ID NO: 3182 - protein, 17 aa, synthetic construct
  REGION 1..17: note = GFR-binding peptide
  VARIANT 4: note = Xaa is C or S
KPTXAPTKLSPINVLYF

SEQ ID NO: 3183 - protein, 20 aa, synthetic construct
  REGION 1..20: note = GFR-binding peptide
  VARIANT 6..7: note = Xaa is C or S
KASKAXXVPTKLSPINILYF

SEQ ID NO: 3184 - protein, 11 aa, synthetic construct
  REGION 1..11: note = GFR-binding peptide
TELSPINMLYF

SEQ ID NO: 3185 - protein, 11 aa, synthetic construct
  REGION 1..11: note = GFR-binding peptide
ARLSPINILYF

SEQ ID NO: 3186 - protein, 13 aa, synthetic construct
  REGION 1..13: note = GFR-binding peptide
VPTKLSPINILYF

SEQ ID NO: 3187 - protein, 19 aa, synthetic construct
  REGION 1..19: note = GFR-binding peptide
  VARIANT 6: note = Xaa is C or S
VTKPTXAPTKLSPINVLYF

SEQ ID NO: 3188 - protein, 17 aa, synthetic construct
  REGION 1..17: note = GFR-binding peptide
  VARIANT 3..4: note = Xaa is C or S
PTXXVPTRLSPINILYF

SEQ ID NO: 3189 - protein, 13 aa, synthetic construct
  REGION 1..13: note = GFR-binding peptide
APTQLSPINVLYF

SEQ ID NO: 3190 - protein, 9 aa, synthetic construct
  REGION 1..9: note = GFR-binding peptide
LSPINMLYF

SEQ ID NO: 3191 - protein, 16 aa, synthetic construct
  REGION 1..16: note = GFR-binding peptide
  VARIANT 2..3: note = Xaa is C or S
TXXAPVKTSPINMLYF

SEQ ID NO: 3192 - protein, 20 aa, synthetic construct
  REGION 1..20: note = GFR-binding peptide
  VARIANT 6..7: note = Xaa is C or S
TVPKPXXAPTQLSPINVLYF

SEQ ID NO: 3193 - protein, 12 aa, synthetic construct
  REGION 1..12: note = GFR-binding peptide
PTKLSPINILYF

SEQ ID NO: 3194 - protein, 20 aa, synthetic construct
  REGION 1..20: note = GFR-binding peptide
  VARIANT 6..7: note = Xaa is C or S
KVGKAXXVPTKLSPINVLYF

SEQ ID NO: 3195 - protein, 12 aa, synthetic construct
  REGION 1..12: note = GFR-binding peptide
PTELSPINMLYF

SEQ ID NO: 3196 - protein, 14 aa, synthetic construct
  REGION 1..14: note = GFR-binding peptide
  VARIANT 1: note = Xaa is C or S
XVPTKLSPINVLYF

SEQ ID NO: 3197 - protein, 18 aa, synthetic construct
  REGION 1..18: note = GFR-binding peptide
  VARIANT 4..5: note = Xaa is C or S
PKAXXVPTELSPINMLYF

SEQ ID NO: 3198 - protein, 16 aa, synthetic construct
  REGION 1..16: note = GFR-binding peptide
  VARIANT 2..3: note = Xaa is C or S
PXXAPTKLSPINVLYF

SEQ ID NO: 3199 - protein, 18 aa, synthetic construct
  REGION 1..18: note = GFR-binding peptide
  VARIANT 5: note = Xaa is C or S
TKPTXAPTKLSPINVLYF

SEQ ID NO: 3200 - protein, 19 aa, synthetic construct
  REGION 1..19: note = GFR-binding peptide
  VARIANT 5..6: note = Xaa is C or S
VPKAXXAPTKLSPINVLYF

SEQ ID NO: 3201 - protein, 15 aa, synthetic construct
  REGION 1..15: note = GFR-binding peptide
  VARIANT 1..2: note = Xaa is C or S
XXVPARLSPINILYF

SEQ ID NO: 3202 - protein, 13 aa, synthetic construct
  REGION 1..13: note = GFR-binding peptide
APVKTSPINMLYF

SEQ ID NO: 3203 - protein, 12 aa, synthetic construct
  REGION 1..12: note = GFR-binding peptide
PVKTSPINMLYF

SEQ ID NO: 3204 - protein, 17 aa, synthetic construct
  REGION 1..17: note = GFR-binding peptide
  VARIANT 3..4: note = Xaa is C or S
KPXXAPTQLSPINVLYF

SEQ ID NO: 3205 - protein, 11 aa, synthetic construct
  REGION 1..11: note = GFR-binding peptide
TQLSPINVLYF

SEQ ID NO: 3206 - protein, 14 aa, synthetic construct
  REGION 1..14: note = GFR-binding peptide
  VARIANT 1: note = Xaa is C or S
XVPTELSPINMLYF

SEQ ID NO: 3207 - protein, 18 aa, synthetic construct
  REGION 1..18: note = GFR-binding peptide
  VARIANT 4..5: note = Xaa is C or S
PSTXXAPVKTSPINMLYF

SEQ ID NO: 3208 - protein, 19 aa, synthetic construct
  REGION 1..19: note = GFR-binding peptide
  VARIANT 5..6: note = Xaa is C or S
VPKPXXAPTQLSPINVLYF

SEQ ID NO: 3209 - protein, 16 aa, synthetic construct
  REGION 1..16: note = GFR-binding peptide
  VARIANT 2..3: note = Xaa is C or S
AXXVPTKLSPINVLYF

SEQ ID NO: 3210 - protein, 10 aa, synthetic construct
  REGION 1..10: note = GFR-binding peptide
KTSPINMLYF

SEQ ID NO: 3211 - protein, 18 aa, synthetic construct
  REGION 1..18: note = GFR-binding peptide
  VARIANT 4..5: note = Xaa is C or S
PPTXXVPTRLSPINILYF

SEQ ID NO: 3212 - protein, 18 aa, synthetic construct
  REGION 1..18: note = GFR-binding peptide
  VARIANT 4..5: note = Xaa is C or S
PKPXXAPTQLSPINVLYF

SEQ ID NO: 3213 - protein, 18 aa, synthetic construct
  REGION 1..18: note = GFR-binding peptide
  VARIANT 4..5: note = Xaa is C or S
PKPXXAPTKLSPINVLYF

SEQ ID NO: 3214 - protein, 16 aa, synthetic construct
  REGION 1..16: note = GFR-binding peptide
  VARIANT 2..3: note = Xaa is C or S
AXXAPTKLSPINVLYF

SEQ ID NO: 3215 - protein, 18 aa, synthetic construct
  REGION 1..18: note = GFR-binding peptide
  VARIANT 4..5: note = Xaa is C or S
SKAXXVPTKLSPINILYF

SEQ ID NO: 3216 - protein, 13 aa, synthetic construct
  REGION 1..13: note = GFR-binding peptide
VPTELSPINMLYF

SEQ ID NO: 3217 - protein, 16 aa, synthetic construct
  REGION 1..16: note = GFR-binding peptide
  VARIANT 2..3: note = Xaa is C or S
AXXVPTKLSPINILYF

SEQ ID NO: 3218 - protein, 13 aa, synthetic construct
  REGION 1..13: note = GFR-binding peptide
VPARLSPINILYF

SEQ ID NO: 3219 - protein, 11 aa, synthetic construct
  REGION 1..11: note = GFR-binding peptide
TRLSPINILYF

SEQ ID NO: 3220 - protein, 20 aa, synthetic construct
  REGION 1..20: note = GFR-binding peptide
  VARIANT 6..7: note = Xaa is C or S
HVPKPXXAPTKLSPINVLYF

SEQ ID NO: 3221 - protein, 15 aa, synthetic construct
  REGION 1..15: note = GFR-binding peptide
  VARIANT 1..2: note = Xaa is C or S
XXVPTRLSPINILYF

SEQ ID NO: 3222 - protein, 9 aa, synthetic construct
  REGION 1..9: note = GFR-binding peptide
LSPINVLYF

SEQ ID NO: 3223 - protein, 16 aa, synthetic construct
  REGION 1..16: note = GFR-binding peptide
  VARIANT 3: note = Xaa is C or S
PTXAPTKLSPINVLYF

SEQ ID NO: 3224 - protein, 15 aa, synthetic construct
  REGION 1..15: note = GFR-binding peptide
  VARIANT 1..2: note = Xaa is C or S
XXVPTKLSPINVLYF

SEQ ID NO: 3225 - protein, 15 aa, synthetic construct
  REGION 1..15: note = GFR-binding peptide
  VARIANT 1..2: note = Xaa is C or S
XXAPTKLSPINVLYF

SEQ ID NO: 3226 - protein, 12 aa, synthetic construct
  REGION 1..12: note = GFR-binding peptide
PTRLSPINILYF

SEQ ID NO: 3227 - protein, 11 aa, synthetic construct
  REGION 1..11: note = GFR-binding peptide
VKTSPINMLYF

SEQ ID NO: 3228 - protein, 17 aa, synthetic construct
  REGION 1..17: note = GFR-binding peptide
  VARIANT 3..4: note = Xaa is C or S
KAXXVPTELSPINMLYF

SEQ ID NO: 3229 - protein, 15 aa, synthetic construct
  REGION 1..15: note = GFR-binding peptide
  VARIANT 1..2: note = Xaa is C or S
XXVPTKLSPINILYF

SEQ ID NO: 3230 - protein, 12 aa, synthetic construct
  REGION 1..12: note = GFR-binding peptide
PTQLSPINVLYF

SEQ ID NO: 3231 - skipped

SEQ ID NO: 3232 - protein, 11 aa, synthetic construct
  REGION 1..11: note = GFR-binding peptide
TKLSPINILYF

SEQ ID NO: 3233 - protein, 12 aa, synthetic construct
  REGION 1..12: note = GFR-binding peptide
PTKLSPINVLYF

SEQ ID NO: 3234 - protein, 18 aa, synthetic construct
  REGION 1..18: note = GFR-binding peptide
  VARIANT 4..5: note = Xaa is C or S
GKAXXVPTKLSPINVLYF

SEQ ID NO: 3235 - protein, 19 aa, synthetic construct
  REGION 1..19: note = GFR-binding peptide
  VARIANT 5..6: note = Xaa is C or S
VPSTXXAPVKTSPINMLYF

SEQ ID NO: 3236 - protein, 15 aa, synthetic construct
  REGION 1..15: note = GFR-binding peptide
  VARIANT 1..2: note = Xaa is C or S
XXAPTQLSPINVLYF

SEQ ID NO: 3237 - protein, 9 aa, synthetic construct
  REGION 1..9: note = GFR-binding peptide
LSPINILYF

SEQ ID NO: 3238 - protein, 17 aa, synthetic construct
  REGION 1..17: note = GFR-binding peptide
  VARIANT 3..4: note = Xaa is C or S
STXXAPVKTSPINMLYF

SEQ ID NO: 3239 - protein, 15 aa, synthetic construct
  REGION 1..15: note = GFR-binding peptide
  VARIANT 2: note = Xaa is C or S
TXAPTKLSPINVLYF

SEQ ID NO: 3240 - protein, 12 aa, synthetic construct
  REGION 1..12: note = GFR-binding peptide
PARLSPINILYF

SEQ ID NO: 3241 - protein, 16 aa, synthetic construct
  REGION 1..16: note = GFR-binding peptide
  VARIANT 2..3: note = Xaa is C or S
PXXAPTQLSPINVLYF

SEQ ID NO: 3242 - protein, 20 aa, synthetic construct
  REGION 1..20: note = GFR-binding peptide
  VARIANT 6..7: note = Xaa is C or S
YVPKPXXAPTKLSPINVLYF

SEQ ID NO: 3243 - protein, 10 aa, synthetic construct
  REGION 1..10: note = GFR-binding peptide
ELSPINMLYF

SEQ ID NO: 3244 - protein, 18 aa, synthetic construct
  REGION 1..18: note = GFR-binding peptide
  VARIANT 4..5: note = Xaa is C or S
PKAXXAPTKLSPINVLYF

SEQ ID NO: 3245 - protein, 18 aa, synthetic construct
  REGION 1..18: note = GFR-binding peptide
  VARIANT 4..5: note = Xaa is C or S
PASXXVPARLSPINILYF

SEQ ID NO: 3246 - protein, 19 aa, synthetic construct
  REGION 1..19: note = GFR-binding peptide
  VARIANT 5..6: note = Xaa is C or S
APASXXVPARLSPINILYF

SEQ ID NO: 3247 - protein, 14 aa, synthetic construct
  REGION 1..14: note = GFR-binding peptide
  VARIANT 1: note = Xaa is C or S
XAPVKTSPINMLYF

SEQ ID NO: 3248 - protein, 17 aa, synthetic construct
  REGION 1..17: note = GFR-binding peptide
  VARIANT 3..4: note = Xaa is C or S
KAXXVPTKLSPINILYF

SEQ ID NO: 3249 - protein, 10 aa, synthetic construct
  REGION 1..10: note = GFR-binding peptide
KLSPINILYF

SEQ ID NO: 3250 - protein, 11 aa, synthetic construct
  REGION 1..11: note = GFR-binding peptide
TKLSPINVLYF

SEQ ID NO: 3251 - protein, 17 aa, synthetic construct
  REGION 1..17: note = GFR-binding peptide
  VARIANT 3..4: note = Xaa is C or S
KPXXAPTKLSPINVLYF

SEQ ID NO: 3252 - protein, 20 aa, synthetic construct
  REGION 1..20: note = GFR-binding peptide
  VARIANT 6..7: note = Xaa is C or S
STPPTXXVPTRLSPINILYF

SEQ ID NO: 3253 - protein, 9 aa, synthetic construct
  REGION 1..9: note = GFR-binding peptide
TSPINMLYF

SEQ ID NO: 3254 - protein, 19 aa, synthetic construct
  REGION 1..19: note = GFR-binding peptide
  VARIANT 5..6: note = Xaa is C or S
VGKAXXVPTKLSPINVLYF

SEQ ID NO: 3255 - protein, 17 aa, synthetic construct
  REGION 1..17: note = GFR-binding peptide
  VARIANT 3..4: note = Xaa is C or S
ASXXVPARLSPINILYF

SEQ ID NO: 3256 - protein, 14 aa, synthetic construct
  REGION 1..14: note = GFR-binding peptide
  VARIANT 1: note = Xaa is C or S
XAPTKLSPINVLYF

SEQ ID NO: 3257 - protein, 20 aa, synthetic construct
  REGION 1..20: note = GFR-binding peptide
  VARIANT 7: note = Xaa is C or S
HVTKPTXAPTKLSPINVLYF

SEQ ID NO: 3258 - protein, 20 aa, synthetic construct
  REGION 1..20: note = GFR-binding peptide
  VARIANT 6..7: note = Xaa is C or S
AVPKAXXAPTKLSPINVLYF

SEQ ID NO: 3259 - protein, 14 aa, synthetic construct
  REGION 1..14: note = GFR-binding peptide
  VARIANT 1: note = Xaa is C or S
XVPARLSPINILYF

SEQ ID NO: 3260 - protein, 19 aa, synthetic construct
  REGION 1..19: note = GFR-binding peptide
  VARIANT 5..6: note = Xaa is C or S
TPPTXXVPTRLSPINILYF

SEQ ID NO: 3261 - protein, 19 aa, synthetic construct
  REGION 1..19: note = GFR-binding peptide
  VARIANT 5..6: note = Xaa is C or S
VPKPXXAPTKLSPINVLYF

SEQ ID NO: 3262 - protein, 19 aa, synthetic construct
  REGION 1..19: note = GFR-binding peptide
  VARIANT 5..6: note = Xaa is C or S
ASKAXXVPTKLSPINILYF

SEQ ID NO: 3263 - protein, 17 aa, synthetic construct
  REGION 1..17: note = GFR-binding peptide
  VARIANT 3..4: note = Xaa is C or S
KAXXVPTKLSPINVLYF

SEQ ID NO: 3264 - protein, 16 aa, synthetic construct
  REGION 1..16: note = GFR-binding peptide
  VARIANT 2..3: note = Xaa is C or S
AXXVPTELSPINMLYF

SEQ ID NO: 3265 - protein, 13 aa, synthetic construct
  REGION 1..13: note = GFR-binding peptide
APTKLSPINVLYF

SEQ ID NO: 3266 - protein, 14 aa, synthetic construct
  REGION 1..14: note = GFR-binding peptide
  VARIANT 1: note = Xaa is C or S
XVPTKLSPINILYF

SEQ ID NO: 3267 - protein, 16 aa, synthetic construct
  REGION 1..16: note = GFR-binding peptide
  VARIANT 2..3: note = Xaa is C or S
SXXVPARLSPINILYF

SEQ ID NO: 3268 - protein, 15 aa, synthetic construct
  REGION 1..15: note = GFR-binding peptide
  VARIANT 1..2: note = Xaa is C or S
XXAPVKTSPINMLYF

SEQ ID NO: 3269 - protein, 14 aa, synthetic construct
  REGION 1..14: note = GFR-binding peptide
  VARIANT 1: note = Xaa is C or S
XAPTQLSPINVLYF

SEQ ID NO: 3270 - protein, 19 aa, synthetic construct
  REGION 1..19: note = GFR-binding peptide
  VARIANT 5..6: note = Xaa is C or S
IPKAXXVPTELSPINMLYF

SEQ ID NO: 3271 - protein, 13 aa, synthetic construct
  REGION 1..13: note = GFR-binding peptide
VPTRLSPINILYF

SEQ ID NO: 3272 - protein, 20 aa, synthetic construct
  REGION 1..20: note = GFR-binding peptide
  VARIANT 6..7: note = Xaa is C or S
AAPASXXVPARLSPINILYF

SEQ ID NO: 3273 - protein, 13 aa, synthetic construct
  REGION 1..13: note = GFR-binding peptide
VPTKLSPINVLYF

SEQ ID NO: 3274 - protein, 17 aa, synthetic construct
  REGION 1..17: note = GFR-binding peptide
  VARIANT 3..4: note = Xaa is C or S
KAXXAPTKLSPINVLYF

SEQ ID NO: 3275 - protein, 10 aa, synthetic construct
  REGION 1..10: note = GFR-binding peptide
QLSPINVLYF

SEQ ID NO: 3276 - protein, 10 aa, synthetic construct
  REGION 1..10: note = GFR-binding peptide
RLSPINILYF

SEQ ID NO: 3277 - protein, 10 aa, synthetic construct
  REGION 1..10: note = GFR-binding peptide
KLSPINVLYF

SEQ ID NO: 3278 - protein, 15 aa, synthetic construct
  REGION 1..15: note = GFR-binding peptide
  VARIANT 1..2: note = Xaa is C or S
XXVPTELSPINMLYF

SEQ ID NO: 3279 - protein, 16 aa, synthetic construct
  REGION 1..16: note = GFR-binding peptide
  VARIANT 2..3: note = Xaa is C or S
TXXVPTRLSPINILYF

SEQ ID NO: 3280 - protein, 14 aa, synthetic construct
  REGION 1..14: note = GFR-binding peptide
  VARIANT 1: note = Xaa is C or S
XVPTRLSPINILYF

SEQ ID NO: 3281 - protein, 17 aa, synthetic construct
  REGION 1..17: note = GFR-binding peptide
  VARIANT 4: note = Xaa is C or S
KPTXAPTKLSPINVLYF

SEQ ID NO: 3282 - protein, 20 aa, synthetic construct
  REGION 1..20: note = GFR-binding peptide
  VARIANT 6..7: note = Xaa is C or S
KASKAXXVPTKLSPINILYF

SEQ ID NO: 3283 - protein, 11 aa, synthetic construct
  REGION 1..11: note = GFR-binding peptide
TELSPINMLYF

SEQ ID NO: 3284 - protein, 11 aa, synthetic construct
  REGION 1..11: note = GFR-binding peptide
ARLSPINILYF

SEQ ID NO: 3285 - protein, 13 aa, synthetic construct
  REGION 1..13: note = GFR-binding peptide
VPTKLSPINILYF

SEQ ID NO: 3286 - protein, 19 aa, synthetic construct
  REGION 1..19: note = GFR-binding peptide
  VARIANT 6: note = Xaa is C or S
VTKPTXAPTKLSPINVLYF

SEQ ID NO: 3287 - protein, 17 aa, synthetic construct
  REGION 1..17: note = GFR-binding peptide
  VARIANT 3..4: note = Xaa is C or S
PTXXVPTRLSPINILYF

SEQ ID NO: 3288 - protein, 13 aa, synthetic construct
  REGION 1..13: note = GFR-binding peptide
APTQLSPINVLYF

SEQ ID NO: 3289 - protein, 9 aa, synthetic construct
  REGION 1..9: note = GFR-binding peptide
LSPINMLYF

SEQ ID NO: 3290 - protein, 16 aa, synthetic construct
  REGION 1..16: note = GFR-binding peptide
  VARIANT 2..3: note = Xaa is C or S
TXXAPVKTSPINMLYF

SEQ ID NO: 3291 - protein, 20 aa, synthetic construct
  REGION 1..20: note = GFR-binding peptide
  VARIANT 6..7: note = Xaa is C or S
TVPKPXXAPTQLSPINVLYF

SEQ ID NO: 3292 - protein, 12 aa, synthetic construct
  REGION 1..12: note = GFR-binding peptide
PTKLSPINILYF

SEQ ID NO: 3293 - protein, 20 aa, synthetic construct
  REGION 1..20: note = GFR-binding peptide
  VARIANT 6..7: note = Xaa is C or S
KVGKAXXVPTKLSPINVLYF

SEQ ID NO: 3294 - protein, 12 aa, synthetic construct
  REGION 1..12: note = GFR-binding peptide
PTELSPINMLYF

SEQ ID NO: 3295 - protein, 14 aa, synthetic construct
  REGION 1..14: note = GFR-binding peptide
  VARIANT 1: note = Xaa is C or S
XVPTKLSPINVLYF

SEQ ID NO: 3296 - protein, 18 aa, synthetic construct
  REGION 1..18: note = GFR-binding peptide
  VARIANT 4..5: note = Xaa is C or S
PKAXXVPTELSPINMLYF

SEQ ID NO: 3297 - protein, 16 aa, synthetic construct
  REGION 1..16: note = GFR-binding peptide
  VARIANT 2..3: note = Xaa is C or S
PXXAPTKLSPINVLYF

SEQ ID NO: 3298 - protein, 18 aa, synthetic construct
  REGION 1..18: note = GFR-binding peptide
  VARIANT 5: note = Xaa is C or S
TKPTXAPTKLSPINVLYF

SEQ ID NO: 3299 - protein, 19 aa, synthetic construct
  REGION 1..19: note = GFR-binding peptide
  VARIANT 5..6: note = Xaa is C or S
VPKAXXAPTKLSPINVLYF

SEQ ID NO: 3300 - protein, 15 aa, synthetic construct
  REGION 1..15: note = GFR-binding peptide
  VARIANT 1..2: note = Xaa is C or S
XXVPARLSPINILYF

SEQ ID NO: 3301 - protein, 13 aa, synthetic construct
  REGION 1..13: note = GFR-binding peptide
APVKTSPINMLYF

SEQ ID NO: 3302 - protein, 12 aa, synthetic construct
  REGION 1..12: note = GFR-binding peptide
PVKTSPINMLYF

SEQ ID NO: 3303 - protein, 17 aa, synthetic construct
  REGION 1..17: note = GFR-binding peptide
  VARIANT 3..4: note = Xaa is C or S
KPXXAPTQLSPINVLYF

SEQ ID NO: 3304 - protein, 11 aa, synthetic construct
  REGION 1..11: note = GFR-binding peptide
TQLSPINVLYF

SEQ ID NO: 3305 - protein, 14 aa, synthetic construct
  REGION 1..14: note = GFR-binding peptide
  VARIANT 1: note = Xaa is C or S
XVPTELSPINMLYF

SEQ ID NO: 3306 - protein, 18 aa, synthetic construct
  REGION 1..18: note = GFR-binding peptide
  VARIANT 4..5: note = Xaa is C or S
PSTXXAPVKTSPINMLYF

SEQ ID NO: 3307 - protein, 19 aa, synthetic construct
  REGION 1..19: note = GFR-binding peptide
  VARIANT 5..6: note = Xaa is C or S
VPKPXXAPTQLSPINVLYF

SEQ ID NO: 3308 - protein, 16 aa, synthetic construct
  REGION 1..16: note = GFR-binding peptide
  VARIANT 2..3: note = Xaa is C or S
AXXVPTKLSPINVLYF

SEQ ID NO: 3309 - protein, 10 aa, synthetic construct
  REGION 1..10: note = GFR-binding peptide
KTSPINMLYF

SEQ ID NO: 3310 - protein, 18 aa, synthetic construct
  REGION 1..18: note = GFR-binding peptide
  VARIANT 4..5: note = Xaa is C or S
PPTXXVPTRLSPINILYF

SEQ ID NO: 3311 - protein, 18 aa, synthetic construct
  REGION 1..18: note = GFR-binding peptide
  VARIANT 4..5: note = Xaa is C or S
PKPXXAPTQLSPINVLYF

SEQ ID NO: 3312 - protein, 18 aa, synthetic construct
  REGION 1..18: note = GFR-binding peptide
  VARIANT 4..5: note = Xaa is C or S
PKPXXAPTKLSPINVLYF

SEQ ID NO: 3313 - protein, 16 aa, synthetic construct
  REGION 1..16: note = GFR-binding peptide
  VARIANT 2..3: note = Xaa is C or S
AXXAPTKLSPINVLYF

SEQ ID NO: 3314 - protein, 18 aa, synthetic construct
  REGION 1..18: note = GFR-binding peptide
  VARIANT 4..5: note = Xaa is C or S
SKAXXVPTKLSPINILYF

SEQ ID NO: 3315 - protein, 13 aa, synthetic construct
  REGION 1..13: note = GFR-binding peptide
VPTELSPINMLYF

SEQ ID NO: 3316 - protein, 16 aa, synthetic construct
  REGION 1..16: note = GFR-binding peptide
  VARIANT 2..3: note = Xaa is C or S
AXXVPTKLSPINILYF

SEQ ID NO: 3317 - protein, 13 aa, synthetic construct
  REGION 1..13: note = GFR-binding peptide
VPARLSPINILYF

SEQ ID NO: 3318 - protein, 11 aa, synthetic construct
  REGION 1..11: note = GFR-binding peptide
TRLSPINILYF

SEQ ID NO: 3319 - protein, 20 aa, synthetic construct
  REGION 1..20: note = GFR-binding peptide
  VARIANT 6..7: note = Xaa is C or S
HVPKPXXAPTKLSPINVLYF

SEQ ID NO: 3320 - protein, 15 aa, synthetic construct
  REGION 1..15: note = GFR-binding peptide
  VARIANT 1..2: note = Xaa is C or S
XXVPTRLSPINILYF

SEQ ID NO: 3321 - protein, 9 aa, synthetic construct
  REGION 1..9: note = GFR-binding peptide
LSPINVLYF

SEQ ID NO: 3322 - protein, 16 aa, synthetic construct
  REGION 1..16: note = GFR-binding peptide
  VARIANT 3: note = Xaa is C or S
PTXAPTKLSPINVLYF

SEQ ID NO: 3323 - protein, 15 aa, synthetic construct
  REGION 1..15: note = GFR-binding peptide
  VARIANT 1..2: note = Xaa is C or S
XXVPTKLSPINVLYF

SEQ ID NO: 3324 - protein, 15 aa, synthetic construct
  REGION 1..15: note = GFR-binding peptide
  VARIANT 1..2: note = Xaa is C or S
XXAPTKLSPINVLYF

SEQ ID NO: 3325 - protein, 12 aa, synthetic construct
  REGION 1..12: note = GFR-binding peptide
PTRLSPINILYF

SEQ ID NO: 3326 - protein, 11 aa, synthetic construct
  REGION 1..11: note = GFR-binding peptide
VKTSPINMLYF

SEQ ID NO: 3327 - protein, 17 aa, synthetic construct
  REGION 1..17: note = GFR-binding peptide
  VARIANT 3..4: note = Xaa is C or S
KAXXVPTELSPINMLYF

SEQ ID NO: 3328 - protein, 15 aa, synthetic construct
  REGION 1..15: note = GFR-binding peptide
  VARIANT 1..2: note = Xaa is C or S
XXVPTKLSPINILYF

SEQ ID NO: 3329 - protein, 12 aa, synthetic construct
  REGION 1..12: note = GFR-binding peptide
PTQLSPINVLYF

SEQ ID NO: 3330 - protein, 11 aa, synthetic construct
  REGION 1..11: note = GFR-binding peptide
TKLSPINILYF

SEQ ID NO: 3331 - skipped

SEQ ID NO: 3332 - protein, 12 aa, synthetic construct
  REGION 1..12: note = GFR-binding peptide
PTKLSPINVLYF

SEQ ID NO: 3333 - protein, 18 aa, synthetic construct
  REGION 1..18: note = GFR-binding peptide
  VARIANT 4..5: note = Xaa is C or S
GKAXXVPTKLSPINVLYF

SEQ ID NO: 3334 - protein, 19 aa, synthetic construct
  REGION 1..19: note = GFR-binding peptide
  VARIANT 5..6: note = Xaa is C or S
VPSTXXAPVKTSPINMLYF

SEQ ID NO: 3335 - protein, 15 aa, synthetic construct
  REGION 1..15: note = GFR-binding peptide
  VARIANT 1..2: note = Xaa is C or S
XXAPTQLSPINVLYF

SEQ ID NO: 3336 - protein, 9 aa, synthetic construct
  REGION 1..9: note = GFR-binding peptide
LSPINILYF

SEQ ID NO: 3337 - protein, 17 aa, synthetic construct
  REGION 1..17: note = GFR-binding peptide
  VARIANT 3..4: note = Xaa is C or S
STXXAPVKTSPINMLYF

SEQ ID NO: 3338 - protein, 15 aa, synthetic construct
  REGION 1..15: note = GFR-binding peptide
  VARIANT 2: note = Xaa is C or S
TXAPTKLSPINVLYF

SEQ ID NO: 3339 - protein, 12 aa, synthetic construct
  REGION 1..12: note = GFR-binding peptide
PARLSPINILYF

SEQ ID NO: 3340 - protein, 16 aa, synthetic construct
  REGION 1..16: note = GFR-binding peptide
  VARIANT 2..3: note = Xaa is C or S
PXXAPTQLSPINVLYF

SEQ ID NO: 3341 - protein, 20 aa, synthetic construct
  REGION 1..20: note = GFR-binding peptide
  VARIANT 6..7: note = Xaa is C or S
YVPKPXXAPTKLSPINVLYF

SEQ ID NO: 3342 - protein, 10 aa, synthetic construct
  REGION 1..10: note = GFR-binding peptide
ELSPINMLYF

SEQ ID NO: 3343 - protein, 18 aa, synthetic construct
  REGION 1..18: note = GFR-binding peptide
  VARIANT 4..5: note = Xaa is C or S
PKAXXAPTKLSPINVLYF

SEQ ID NO: 3344 - protein, 18 aa, synthetic construct
  REGION 1..18: note = GFR-binding peptide
  VARIANT 4..5: note = Xaa is C or S
PASXXVPARLSPINILYF

SEQ ID NO: 3345 - protein, 19 aa, synthetic construct
  REGION 1..19: note = GFR-binding peptide
  VARIANT 5..6: note = Xaa is C or S
APASXXVPARLSPINILYF

SEQ ID NO: 3346 - protein, 14 aa, synthetic construct
  REGION 1..14: note = GFR-binding peptide
  VARIANT 1: note = Xaa is C or S
XAPVKTSPINMLYF

SEQ ID NO: 3347 - protein, 17 aa, synthetic construct
  REGION 1..17: note = GFR-binding peptide
  VARIANT 3..4: note = Xaa is C or S
KAXXVPTKLSPINILYF

SEQ ID NO: 3348 - protein, 10 aa, synthetic construct
  REGION 1..10: note = GFR-binding peptide
KLSPINILYF

SEQ ID NO: 3349 - protein, 11 aa, synthetic construct
  REGION 1..11: note = GFR-binding peptide
TKLSPINVLYF

SEQ ID NO: 3350 - protein, 17 aa, synthetic construct
  REGION 1..17: note = GFR-binding peptide
  VARIANT 3..4: note = Xaa is C or S
KPXXAPTKLSPINVLYF

SEQ ID NO: 3351 - protein, 20 aa, synthetic construct
  REGION 1..20: note = GFR-binding peptide
  VARIANT 6..7: note = Xaa is C or S
STPPTXXVPTRLSPINILYF

SEQ ID NO: 3352 - protein, 9 aa, synthetic construct
  REGION 1..9: note = GFR-binding peptide
TSPINMLYF

SEQ ID NO: 3353 - protein, 19 aa, synthetic construct
  REGION 1..19: note = GFR-binding peptide
  VARIANT 5..6: note = Xaa is C or S
VGKAXXVPTKLSPINVLYF

SEQ ID NO: 3354 - protein, 17 aa, synthetic construct
  REGION 1..17: note = GFR-binding peptide
  VARIANT 3..4: note = Xaa is C or S
ASXXVPARLSPINILYF

SEQ ID NO: 3355 - protein, 14 aa, synthetic construct
  REGION 1..14: note = GFR-binding peptide
  VARIANT 1: note = Xaa is C or S
XAPTKLSPINVLYF

SEQ ID NO: 3356 - protein, 20 aa, synthetic construct
  REGION 1..20: note = GFR-binding peptide
  VARIANT 7: note = Xaa is C or S
HVTKPTXAPTKLSPINVLYF

SEQ ID NO: 3357 - protein, 20 aa, synthetic construct
  REGION 1..20: note = GFR-binding peptide
  VARIANT 6..7: note = Xaa is C or S
AVPKAXXAPTKLSPINVLYF

SEQ ID NO: 3358 - protein, 14 aa, synthetic construct
  REGION 1..14: note = GFR-binding peptide
  VARIANT 1: note = Xaa is C or S
XVPARLSPINILYF

SEQ ID NO: 3359 - protein, 19 aa, synthetic construct
  REGION 1..19: note = GFR-binding peptide
  VARIANT 5..6: note = Xaa is C or S
TPPTXXVPTRLSPINILYF

SEQ ID NO: 3360 - protein, 19 aa, synthetic construct
  REGION 1..19: note = GFR-binding peptide
  VARIANT 5..6: note = Xaa is C or S
VPKPXXAPTKLSPINVLYF

SEQ ID NO: 3361 - protein, 19 aa, synthetic construct
  REGION 1..19: note = GFR-binding peptide
  VARIANT 5..6: note = Xaa is C or S
ASKAXXVPTKLSPINILYF

SEQ ID NO: 3362 - protein, 17 aa, synthetic construct
  REGION 1..17: note = GFR-binding peptide
  VARIANT 3..4: note = Xaa is C or S
KAXXVPTKLSPINVLYF

SEQ ID NO: 3363 - protein, 18 aa, synthetic construct
  REGION 1..18: note = GFR-binding peptide
  VARIANT 4..5: note = Xaa is C or S
PPTXXVPTRLNAISILYF

SEQ ID NO: 3364 - protein, 14 aa, synthetic construct
  REGION 1..14: note = GFR-binding peptide
  VARIANT 1: note = Xaa is C or S
XVPQALNAISILYF

SEQ ID NO: 3365 - protein, 13 aa, synthetic construct
  REGION 1..13: note = GFR-binding peptide
VPTELNAISMLYF

SEQ ID NO: 3366 - protein, 14 aa, synthetic construct
  REGION 1..14: note = GFR-binding peptide
  VARIANT 1: note = Xaa is C or S
XVSQDLNAISILYF

SEQ ID NO: 3367 - protein, 19 aa, synthetic construct
  REGION 1..19: note = GFR-binding peptide
  VARIANT 5..6: note = Xaa is C or S
SASPXXVSQDLNAISILYF

SEQ ID NO: 3368 - protein, 14 aa, synthetic construct
  REGION 1..14: note = GFR-binding peptide
  VARIANT 1: note = Xaa is C or S
XVPQDLNAISILYF

SEQ ID NO: 3369 - protein, 15 aa, synthetic construct
  REGION 1..15: note = GFR-binding peptide
  VARIANT 1..2: note = Xaa is C or S
XXVPTRLNAISILYF

SEQ ID NO: 3370 - protein, 11 aa, synthetic construct
  REGION 1..11: note = GFR-binding peptide
QDLNAISILYF

SEQ ID NO: 3371 - protein, 13 aa, synthetic construct
  REGION 1..13: note = GFR-binding peptide
VPQDLNAISILYF

SEQ ID NO: 3372 - protein, 11 aa, synthetic construct
  REGION 1..11: note = GFR-binding peptide
TRLNAISILYF

SEQ ID NO: 3373 - protein, 19 aa, synthetic construct
  REGION 1..19: note = GFR-binding peptide
  VARIANT 5..6: note = Xaa is C or S
SAAPXXVPQALNAISILYF

SEQ ID NO: 3374 - protein, 16 aa, synthetic construct
  REGION 1..16: note = GFR-binding peptide
  VARIANT 2..3: note = Xaa is C or S
PXXVSQDLNAISILYF

SEQ ID NO: 3375 - protein, 17 aa, synthetic construct
  REGION 1..17: note = GFR-binding peptide
  VARIANT 3..4: note = Xaa is C or S
SPXXVPQDLNAISILYF

SEQ ID NO: 3376 - protein, 16 aa, synthetic construct
  REGION 1..16: note = GFR-binding peptide
  VARIANT 2..3: note = Xaa is C or S
PXXVPQALNAISILYF

SEQ ID NO: 3377 - protein, 14 aa, synthetic construct
  REGION 1..14: note = GFR-binding peptide
  VARIANT 1: note = Xaa is C or S
XVPTELNAISMLYF

SEQ ID NO: 3378 - protein, 12 aa, synthetic construct
  REGION 1..12: note = GFR-binding peptide
PTELNAISMLYF

SEQ ID NO: 3379 - protein, 20 aa, synthetic construct
  REGION 1..20: note = GFR-binding peptide
  VARIANT 6..7: note = Xaa is C or S
ASASPXXVPQDLNAISILYF

SEQ ID NO: 3380 - protein, 10 aa, synthetic construct
  REGION 1..10: note = GFR-binding peptide
DLNAISILYF

SEQ ID NO: 3381 - protein, 19 aa, synthetic construct
  REGION 1..19: note = GFR-binding peptide
  VARIANT 5..6: note = Xaa is C or S
TPPTXXVPTRLNAISILYF

SEQ ID NO: 3382 - protein, 18 aa, synthetic construct
  REGION 1..18: note = GFR-binding peptide
  VARIANT 4..5: note = Xaa is C or S
AAPXXVPQALNAISILYF

SEQ ID NO: 3383 - protein, 20 aa, synthetic construct
  REGION 1..20: note = GFR-binding peptide
  VARIANT 6..7: note = Xaa is C or S
ASAAPXXVPQALNAISILYF

SEQ ID NO: 3384 - protein, 10 aa, synthetic construct
  REGION 1..10: note = GFR-binding peptide
ELNAISMLYF

SEQ ID NO: 3385 - protein, 15 aa, synthetic construct
  REGION 1..15: note = GFR-binding peptide
  VARIANT 1..2: note = Xaa is C or S
XXVSQDLNAISILYF

SEQ ID NO: 3386 - protein, 18 aa, synthetic construct
  REGION 1..18: note = GFR-binding peptide
  VARIANT 4..5: note = Xaa is C or S
ASPXXVSQDLNAISILYF

SEQ ID NO: 3387 - protein, 15 aa, synthetic construct
  REGION 1..15: note = GFR-binding peptide
  VARIANT 1..2: note = Xaa is C or S
XXVPQDLNAISILYF

SEQ ID NO: 3388 - protein, 14 aa, synthetic construct
  REGION 1..14: note = GFR-binding peptide
  VARIANT 1: note = Xaa is C or S
XVPTRLNAISILYF

SEQ ID NO: 3389 - protein, 18 aa, synthetic construct
  REGION 1..18: note = GFR-binding peptide
  VARIANT 4..5: note = Xaa is C or S
PKAXXVPTELNAISMLYF

SEQ ID NO: 3390 - protein, 12 aa, synthetic construct
  REGION 1..12: note = GFR-binding peptide
PQALNAISILYF

SEQ ID NO: 3391 - protein, 16 aa, synthetic construct
  REGION 1..16: note = GFR-binding peptide
  VARIANT 2..3: note = Xaa is C or S
TXXVPTRLNAISILYF

SEQ ID NO: 3392 - protein, 20 aa, synthetic construct
  REGION 1..20: note = GFR-binding peptide
  VARIANT 6..7: note = Xaa is C or S
STPPTXXVPTRLNAISILYF

SEQ ID NO: 3393 - protein, 20 aa, synthetic construct
  REGION 1..20: note = GFR-binding peptide
  VARIANT 6..7: note = Xaa is C or S
KIPKAXXVPTELNAISMLYF

SEQ ID NO: 3394 - protein, 12 aa, synthetic construct
  REGION 1..12: note = GFR-binding peptide
PQDLNAISILYF

SEQ ID NO: 3395 - protein, 11 aa, synthetic construct
  REGION 1..11: note = GFR-binding peptide
QALNAISILYF

SEQ ID NO: 3396 - protein, 20 aa, synthetic construct
  REGION 1..20: note = GFR-binding peptide
  VARIANT 6..7: note = Xaa is C or S
ASASPXXVSQDLNAISILYF

SEQ ID NO: 3397 - protein, 13 aa, synthetic construct
  REGION 1..13: note = GFR-binding peptide
VPTRLNAISILYF

SEQ ID NO: 3398 - protein, 19 aa, synthetic construct
  REGION 1..19: note = GFR-binding peptide
  VARIANT 5..6: note = Xaa is C or S
IPKAXXVPTELNAISMLYF

SEQ ID NO: 3399 - protein, 17 aa, synthetic construct
  REGION 1..17: note = GFR-binding peptide
  VARIANT 3..4: note = Xaa is C or S
PTXXVPTRLNAISILYF

SEQ ID NO: 3400 - protein, 10 aa, synthetic construct
  REGION 1..10: note = GFR-binding peptide
RLNAISILYF

SEQ ID NO: 3401 - protein, 13 aa, synthetic construct
  REGION 1..13: note = GFR-binding peptide
VSQDLNAISILYF

SEQ ID NO: 3402 - protein, 12 aa, synthetic construct
  REGION 1..12: note = GFR-binding peptide
SQDLNAISILYF

SEQ ID NO: 3403 - protein, 19 aa, synthetic construct
  REGION 1..19: note = GFR-binding peptide
  VARIANT 5..6: note = Xaa is C or S
SASPXXVPQDLNAISILYF

SEQ ID NO: 3404 - protein, 17 aa, synthetic construct
  REGION 1..17: note = GFR-binding peptide
  VARIANT 3..4: note = Xaa is C or S
KAXXVPTELNAISMLYF

SEQ ID NO: 3405 - protein, 15 aa, synthetic construct
  REGION 1..15: note = GFR-binding peptide
  VARIANT 1..2: note = Xaa is C or S
XXVPTELNAISMLYF

SEQ ID NO: 3406 - protein, 20 aa, synthetic construct
  REGION 1..20: note = GFR-binding peptide
  VARIANT 6..7: note = Xaa is C or S
SIPKAXXVPTELNAISMLYF

SEQ ID NO: 3407 - protein, 12 aa, synthetic construct
  REGION 1..12: note = GFR-binding peptide
PTRLNAISILYF

SEQ ID NO: 3408 - protein, 17 aa, synthetic construct
  REGION 1..17: note = GFR-binding peptide
  VARIANT 3..4: note = Xaa is C or S
APXXVPQALNAISILYF

SEQ ID NO: 3409 - protein, 18 aa, synthetic construct
  REGION 1..18: note = GFR-binding peptide
  VARIANT 4..5: note = Xaa is C or S
ASPXXVPQDLNAISILYF

SEQ ID NO: 3410 - protein, 10 aa, synthetic construct
  REGION 1..10: note = GFR-binding peptide
ALNAISILYF

SEQ ID NO: 3411 - protein, 16 aa, synthetic construct
  REGION 1..16: note = GFR-binding peptide
  VARIANT 2..3: note = Xaa is C or S
AXXVPTELNAISMLYF

SEQ ID NO: 3412 - protein, 11 aa, synthetic construct
  REGION 1..11: note = GFR-binding peptide
TELNAISMLYF

SEQ ID NO: 3413 - protein, 15 aa, synthetic construct
  REGION 1..15: note = GFR-binding peptide
  VARIANT 1..2: note = Xaa is C or S
XXVPQALNAISILYF

SEQ ID NO: 3414 - protein, 9 aa, synthetic construct
  REGION 1..9: note = GFR-binding peptide
LNAISMLYF

SEQ ID NO: 3415 - protein, 17 aa, synthetic construct
  REGION 1..17: note = GFR-binding peptide
  VARIANT 3..4: note = Xaa is C or S
SPXXVSQDLNAISILYF

SEQ ID NO: 3416 - protein, 13 aa, synthetic construct
  REGION 1..13: note = GFR-binding peptide
VPQALNAISILYF

SEQ ID NO: 3417 - protein, 16 aa, synthetic construct
  REGION 1..16: note = GFR-binding peptide
  VARIANT 2..3: note = Xaa is C or S
PXXVPQDLNAISILYF

SEQ ID NO: 3418 - protein, 9 aa, synthetic construct
  REGION 1..9: note = GFR-binding peptide
LNAISILYF

SEQ ID NO: 3419 - protein, 13 aa, synthetic construct
  REGION 1..13: note = GFR-binding peptide
APTKLSPISVLFI

SEQ ID NO: 3420 - protein, 12 aa, synthetic construct
  REGION 1..12: note = GFR-binding peptide
PTKLSPISILYI

SEQ ID NO: 3421 - protein, 14 aa, synthetic construct
  REGION 1..14: note = GFR-binding peptide
  VARIANT 1: note = Xaa is C or S
XVPQALSPISILFI

SEQ ID NO: 3422 - protein, 10 aa, synthetic construct
  REGION 1..10: note = GFR-binding peptide
ELSPISMLYI

SEQ ID NO: 3423 - protein, 20 aa, synthetic construct
  REGION 1..20: note = GFR-binding peptide
  VARIANT 7: note = Xaa is C or S
HVTKPTXAPTKLSPISVLFI

SEQ ID NO: 3424 - protein, 11 aa, synthetic construct
  REGION 1..11: note = GFR-binding peptide
TELSPISMLFI

SEQ ID NO: 3425 - protein, 11 aa, synthetic construct
  REGION 1..11: note = GFR-binding peptide
TQLEPLTVLYY

SEQ ID NO: 3426 - protein, 13 aa, synthetic construct
  REGION 1..13: note = GFR-binding peptide
VPQDLEPLPIVYY

SEQ ID NO: 3427 - protein, 12 aa, synthetic construct
  REGION 1..12: note = GFR-binding peptide
PTQLEPLPVVYY

SEQ ID NO: 3428 - protein, 19 aa, synthetic construct
  REGION 1..19: note = GFR-binding peptide
  VARIANT 5..6: note = Xaa is C or S
VPKPXXAPTKLEPLTVLYY

SEQ ID NO: 3429 - protein, 14 aa, synthetic construct
  REGION 1..14: note = GFR-binding peptide
  VARIANT 1: note = Xaa is C or S
XVPTRLSPISILYI

SEQ ID NO: 3430 - protein, 15 aa, synthetic construct
  REGION 1..15: note = GFR-binding peptide
  VARIANT 1..2: note = Xaa is C or S
XXAPTKLSPISVLYI

SEQ ID NO: 3431 - protein, 17 aa, synthetic construct
  REGION 1..17: note = GFR-binding peptide
  VARIANT 3..4: note = Xaa is C or S
KPXXAPTQLEPLTVLYY

SEQ ID NO: 3432 - protein, 16 aa, synthetic construct
  REGION 1..16: note = GFR-binding peptide
  VARIANT 2..3: note = Xaa is C or S
PXXAPTKLSPISVLYI

SEQ ID NO: 3433 - protein, 18 aa, synthetic construct
  REGION 1..18: note = GFR-binding peptide
  VARIANT 5: note = Xaa is C or S
TKPTXAPTKLEPLTVLYY

SEQ ID NO: 3434 - protein, 18 aa, synthetic construct
  REGION 1..18: note = GFR-binding peptide
  VARIANT 4..5: note = Xaa is C or S
PKPXXAPTKLEPLTVLYY

SEQ ID NO: 3435 - protein, 16 aa, synthetic construct
  REGION 1..16: note = GFR-binding peptide
  VARIANT 2..3: note = Xaa is C or S
PXXAPTKLEPLPVVYY

SEQ ID NO: 3436 - protein, 16 aa, synthetic construct
  REGION 1..16: note = GFR-binding peptide
  VARIANT 3: note = Xaa is C or S
PTXAPTKLEPLTVLYY

SEQ ID NO: 3437 - protein, 18 aa, synthetic construct
  REGION 1..18: note = GFR-binding peptide
  VARIANT 4..5: note = Xaa is C or S
PKAXXVPTELEPLPMVYY

SEQ ID NO: 3438 - protein, 19 aa, synthetic construct
  REGION 1..19: note = GFR-binding peptide
  VARIANT 5..6: note = Xaa is C or S
IPKAXXVPTELSPISMLYI

SEQ ID NO: 3439 - protein, 19 aa, synthetic construct
  REGION 1..19: note = GFR-binding peptide
  VARIANT 5..6: note = Xaa is C or S
SASPXXVPQDLSPISILFI

SEQ ID NO: 3440 - protein, 18 aa, synthetic construct
  REGION 1..18: note = GFR-binding peptide
  VARIANT 4..5: note = Xaa is C or S
ASPXXVSQDLEPLPIVYY

SEQ ID NO: 3441 - protein, 20 aa, synthetic construct
  REGION 1..20: note = GFR-binding peptide
  VARIANT 6..7: note = Xaa is C or S
GSAGPXXTPTKMSPISMLYI

SEQ ID NO: 3442 - protein, 9 aa, synthetic construct
  REGION 1..9: note = GFR-binding peptide
LEPLPVVYY

SEQ ID NO: 3443 - protein, 20 aa, synthetic construct
  REGION 1..20: note = GFR-binding peptide
  VARIANT 6..7: note = Xaa is C or S
YVPKPXXAPTKLSPISVLFI

SEQ ID NO: 3444 - protein, 16 aa, synthetic construct
  REGION 1..16: note = GFR-binding peptide
  VARIANT 2..3: note = Xaa is C or S
AXXVPTELSPISMLFI

SEQ ID NO: 3445 - protein, 11 aa, synthetic construct
  REGION 1..11: note = GFR-binding peptide
TKMSPISMLYI

SEQ ID NO: 3446 - protein, 20 aa, synthetic construct
  REGION 1..20: note = GFR-binding peptide
  VARIANT 6..7: note = Xaa is C or S
SIPKAXXVPTELSPISMLFI

SEQ ID NO: 3447 - protein, 14 aa, synthetic construct
  REGION 1..14: note = GFR-binding peptide
  VARIANT 1: note = Xaa is C or S
XAPTQLSPISVLYI

SEQ ID NO: 3448 - protein, 15 aa, synthetic construct
  REGION 1..15: note = GFR-binding peptide
  VARIANT 1..2: note = Xaa is C or S
XXAPVKTSPISMLYI

SEQ ID NO: 3449 - protein, 10 aa, synthetic construct
  REGION 1..10: note = GFR-binding peptide
DLEPLPIVYY

SEQ ID NO: 3450 - protein, 13 aa, synthetic construct
  REGION 1..13: note = GFR-binding peptide
VPTELEPLTMLYY

SEQ ID NO: 3451 - protein, 11 aa, synthetic construct
  REGION 1..11: note = GFR-binding peptide
TRLEPLPIVYY

SEQ ID NO: 3452 - protein, 10 aa, synthetic construct
  REGION 1..10: note = GFR-binding peptide
KLSPISVLFI

SEQ ID NO: 3453 - protein, 19 aa, synthetic construct
  REGION 1..19: note = GFR-binding peptide
  VARIANT 5..6: note = Xaa is C or S
VPKPXXAPTKLEPLPVVYY

SEQ ID NO: 3454 - protein, 15 aa, synthetic construct
  REGION 1..15: note = GFR-binding peptide
  VARIANT 1..2: note = Xaa is C or S
XXVPTELEPLTMLYY

SEQ ID NO: 3455 - protein, 9 aa, synthetic construct
  REGION 1..9: note = GFR-binding peptide
LSPISMLFI

SEQ ID NO: 3456 - protein, 14 aa, synthetic construct
  REGION 1..14: note = GFR-binding peptide
  VARIANT 1: note = Xaa is C or S
XVPTKLSPISILYI

SEQ ID NO: 3457 - protein, 18 aa, synthetic construct
  REGION 1..18: note = GFR-binding peptide
  VARIANT 4..5: note = Xaa is C or S
PKAXXVPTELSPISMLYI

SEQ ID NO: 3458 - protein, 16 aa, synthetic construct
  REGION 1..16: note = GFR-binding peptide
  VARIANT 2..3: note = Xaa is C or S
AXXVPTELSPISMLYI

SEQ ID NO: 3459 - protein, 15 aa, synthetic construct
  REGION 1..15: note = GFR-binding peptide
  VARIANT 1..2: note = Xaa is C or S
XXVSQDLSPISILFI

SEQ ID NO: 3460 - protein, 15 aa, synthetic construct
  REGION 1..15: note = GFR-binding peptide
  VARIANT 1..2: note = Xaa is C or S
XXVPTKLSPISVLYI

SEQ ID NO: 3461 - protein, 16 aa, synthetic construct
  REGION 1..16: note = GFR-binding peptide
  VARIANT 2..3: note = Xaa is C or S
PXXVPQDLEPLPIVYY

SEQ ID NO: 3462 - protein, 11 aa, synthetic construct
  REGION 1..11: note = GFR-binding peptide
TQLEPLPVVYY

SEQ ID NO: 3463 - protein, 10 aa, synthetic construct
  REGION 1..10: note = GFR-binding peptide
ELSPISMLFI

SEQ ID NO: 3464 - protein, 13 aa, synthetic construct
  REGION 1..13: note = GFR-binding peptide
VPQALEPLTILYY

SEQ ID NO: 3465 - protein, 17 aa, synthetic construct
  REGION 1..17: note = GFR-binding peptide
  VARIANT 4: note = Xaa is C or S
KPTXAPTKLSPISVLFI

SEQ ID NO: 3466 - protein, 17 aa, synthetic construct
  REGION 1..17: note = GFR-binding peptide
  VARIANT 3..4: note = Xaa is C or S
KPXXAPTQLEPLPVVYY

SEQ ID NO: 3467 - protein, 10 aa, synthetic construct
  REGION 1..10: note = GFR-binding peptide
KMSPISMLYI

SEQ ID NO: 3468 - protein, 17 aa, synthetic construct
  REGION 1..17: note = GFR-binding peptide
  VARIANT 3..4: note = Xaa is C or S
PTXXVPTRLEPLPIVYY

SEQ ID NO: 3469 - protein, 14 aa, synthetic construct
  REGION 1..14: note = GFR-binding peptide
  VARIANT 1: note = Xaa is C or S
XAPTQLEPLPVVYY

SEQ ID NO: 3470 - protein, 13 aa, synthetic construct
  REGION 1..13: note = GFR-binding peptide
APTQLEPLTVLYY

SEQ ID NO: 3471 - protein, 17 aa, synthetic construct
  REGION 1..17: note = GFR-binding peptide
  VARIANT 4: note = Xaa is C or S
KPTXAPTKLEPLPVVYY

SEQ ID NO: 3472 - protein, 19 aa, synthetic construct
  REGION 1..19: note = GFR-binding peptide
  VARIANT 5..6: note = Xaa is C or S
IPKAXXVPTELSPISMLFI

SEQ ID NO: 3473 - protein, 18 aa, synthetic construct
  REGION 1..18: note = GFR-binding peptide
  VARIANT 4..5: note = Xaa is C or S
PPTXXVPTRLEPLTILYY

SEQ ID NO: 3474 - protein, 13 aa, synthetic construct
  REGION 1..13: note = GFR-binding peptide
VPTELSPISMLYI

SEQ ID NO: 3475 - protein, 10 aa, synthetic construct
  REGION 1..10: note = GFR-binding peptide
RLEPLTILYY

SEQ ID NO: 3476 - protein, 12 aa, synthetic construct
  REGION 1..12: note = GFR-binding peptide
PTQLEPLTVLYY

SEQ ID NO: 3477 - protein, 18 aa, synthetic construct
  REGION 1..18: note = GFR-binding peptide
  VARIANT 4..5: note = Xaa is C or S
PKPXXAPTKLEPLPVVYY

SEQ ID NO: 3478 - protein, 16 aa, synthetic construct
  REGION 1..16: note = GFR-binding peptide
  VARIANT 3: note = Xaa is C or S
PTXAPTKLEPLPVVYY

SEQ ID NO: 3479 - protein, 17 aa, synthetic construct
  REGION 1..17: note = GFR-binding peptide
  VARIANT 3..4: note = Xaa is C or S
SPXXVSQDLEPLPIVYY

SEQ ID NO: 3480 - protein, 16 aa, synthetic construct
  REGION 1..16: note = GFR-binding peptide
  VARIANT 2..3: note = Xaa is C or S
PXXAPTKLEPLTVLYY

SEQ ID NO: 3481 - protein, 20 aa, synthetic construct
  REGION 1..20: note = GFR-binding peptide
  VARIANT 6..7: note = Xaa is C or S
SIPKAXXVPTELSPISMLYI

SEQ ID NO: 3482 - protein, 11 aa, synthetic construct
  REGION 1..11: note = GFR-binding peptide
TKLSPISVLFI

SEQ ID NO: 3483 - protein, 19 aa, synthetic construct
  REGION 1..19: note = GFR-binding peptide
  VARIANT 5..6: note = Xaa is C or S
SAAPXXVPQALSPISILFI

SEQ ID NO: 3484 - protein, 13 aa, synthetic construct
  REGION 1..13: note = GFR-binding peptide
VPTKLSPISVLYI

SEQ ID NO: 3485 - protein, 14 aa, synthetic construct
  REGION 1..14: note = GFR-binding peptide
  VARIANT 1: note = Xaa is C or S
XVPTRLEPLPIVYY

SEQ ID NO: 3486 - protein, 20 aa, synthetic construct
  REGION 1..20: note = GFR-binding peptide
  VARIANT 6..7: note = Xaa is C or S
KIPKAXXVPTELEPLTMLYY

SEQ ID NO: 3487 - protein, 19 aa, synthetic construct
  REGION 1..19: note = GFR-binding peptide
  VARIANT 5..6: note = Xaa is C or S
VPKAXXAPTKLSPISVLYI

SEQ ID NO: 3488 - protein, 13 aa, synthetic construct
  REGION 1..13: note = GFR-binding peptide
VPTRLEPLTILYY

SEQ ID NO: 3489 - protein, 11 aa, synthetic construct
  REGION 1..11: note = GFR-binding peptide
TELEPLPMVYY

SEQ ID NO: 3490 - protein, 17 aa, synthetic construct
  REGION 1..17: note = GFR-binding peptide
  VARIANT 3..4: note = Xaa is C or S
KPXXAPTKLSPISVLFI

SEQ ID NO: 3491 - protein, 12 aa, synthetic construct
  REGION 1..12: note = GFR-binding peptide
PTQLSPISVLYI

SEQ ID NO: 3492 - protein, 15 aa, synthetic construct
  REGION 1..15: note = GFR-binding peptide
  VARIANT 1..2: note = Xaa is C or S
XXAPTKLEPLPVVYY

SEQ ID NO: 3493 - protein, 16 aa, synthetic construct
  REGION 1..16: note = GFR-binding peptide
  VARIANT 2..3: note = Xaa is C or S
AXXVPTKLSPISILYI

SEQ ID NO: 3494 - protein, 12 aa, synthetic construct
  REGION 1..12: note = GFR-binding peptide
PTRLEPLPIVYY

SEQ ID NO: 3495 - protein, 10 aa, synthetic construct
  REGION 1..10: note = GFR-binding peptide
KLSPISVLYI

SEQ ID NO: 3496 - protein, 13 aa, synthetic construct
  REGION 1..13: note = GFR-binding peptide
VPQDLSPISILFI

SEQ ID NO: 3497 - protein, 15 aa, synthetic construct
  REGION 1..15: note = GFR-binding peptide
  VARIANT 2: note = Xaa is C or S
TXAPTKLSPISVLFI

SEQ ID NO: 3498 - protein, 13 aa, synthetic construct
  REGION 1..13: note = GFR-binding peptide
APTKLEPLPVVYY

SEQ ID NO: 3499 - protein, 13 aa, synthetic construct
  REGION 1..13: note = GFR-binding peptide
VPTELSPISMLFI

SEQ ID NO: 3500 - protein, 16 aa, synthetic construct
  REGION 1..16: note = GFR-binding peptide
  VARIANT 2..3: note = Xaa is C or S
PXXVPQALEPLTILYY

SEQ ID NO: 3501 - protein, 10 aa, synthetic construct
  REGION 1..10: note = GFR-binding peptide
RLEPLPIVYY

SEQ ID NO: 3502 - protein, 20 aa, synthetic construct
  REGION 1..20: note = GFR-binding peptide
  VARIANT 6..7: note = Xaa is C or S
YVPKPXXAPTKLSPISVLYI

SEQ ID NO: 3503 - protein, 20 aa, synthetic construct
  REGION 1..20: note = GFR-binding peptide
  VARIANT 6..7: note = Xaa is C or S
SIPKAXXVPTELEPLPMVYY

SEQ ID NO: 3504 - protein, 16 aa, synthetic construct
  REGION 1..16: note = GFR-binding peptide
  VARIANT 2..3: note = Xaa is C or S
TXXVPTRLEPLTILYY

SEQ ID NO: 3505 - protein, 14 aa, synthetic construct
  REGION 1..14: note = GFR-binding peptide
  VARIANT 1: note = Xaa is C or S
XVPTRLEPLTILYY

SEQ ID NO: 3506 - protein, 13 aa, synthetic construct
  REGION 1..13: note = GFR-binding peptide
TPTKMSPISMLYI

SEQ ID NO: 3507 - protein, 14 aa, synthetic construct
  REGION 1..14: note = GFR-binding peptide
  VARIANT 1: note = Xaa is C or S
XAPTKLEPLTVLYY

SEQ ID NO: 3508 - protein, 16 aa, synthetic construct
  REGION 1..16: note = GFR-binding peptide
  VARIANT 3: note = Xaa is C or S
PTXAPTKLSPISVLFI

SEQ ID NO: 3509 - protein, 17 aa, synthetic construct
  REGION 1..17: note = GFR-binding peptide
  VARIANT 4: note = Xaa is C or S
KPTXAPTKLEPLTVLYY

SEQ ID NO: 3510 - protein, 14 aa, synthetic construct
  REGION 1..14: note = GFR-binding peptide
  VARIANT 1: note = Xaa is C or S
XVSQDLSPISILFI

SEQ ID NO: 3511 - protein, 11 aa, synthetic construct
  REGION 1..11: note = GFR-binding peptide
QDLEPLPIVYY

SEQ ID NO: 3512 - protein, 19 aa, synthetic construct
  REGION 1..19: note = GFR-binding peptide
  VARIANT 6: note = Xaa is C or S
VTKPTXAPTKLEPLTVLYY

SEQ ID NO: 3513 - protein, 17 aa, synthetic construct
  REGION 1..17: note = GFR-binding peptide
  VARIANT 3..4: note = Xaa is C or S
GPXXTPTKMSPISMLYI

SEQ ID NO: 3514 - protein, 9 aa, synthetic construct
  REGION 1..9: note = GFR-binding peptide
LSPISVLFI

SEQ ID NO: 3515 - protein, 14 aa, synthetic construct
  REGION 1..14: note = GFR-binding peptide
  VARIANT 1: note = Xaa is C or S
XAPVKTSPISMLYI

SEQ ID NO: 3516 - protein, 15 aa, synthetic construct
  REGION 1..15: note = GFR-binding peptide
  VARIANT 2: note = Xaa is C or S
TXAPTKLEPLPVVYY

SEQ ID NO: 3517 - protein, 16 aa, synthetic construct
  REGION 1..16: note = GFR-binding peptide
  VARIANT 2..3: note = Xaa is C or S
AXXVPTELEPLTMLYY

SEQ ID NO: 3518 - protein, 11 aa, synthetic construct
  REGION 1..11: note = GFR-binding peptide
QALSPISILFI

SEQ ID NO: 3519 - protein, 11 aa, synthetic construct
  REGION 1..11: note = GFR-binding peptide
TQLSPISVLYI

SEQ ID NO: 3520 - protein, 18 aa, synthetic construct
  REGION 1..18: note = GFR-binding peptide
  VARIANT 4..5: note = Xaa is C or S
PKAXXVPTELEPLTMLYY

SEQ ID NO: 3521 - protein, 14 aa, synthetic construct
  REGION 1..14: note = GFR-binding peptide
  VARIANT 1: note = Xaa is C or S
XAPTQLEPLTVLYY

SEQ ID NO: 3522 - protein, 15 aa, synthetic construct
  REGION 1..15: note = GFR-binding peptide
  VARIANT 1..2: note = Xaa is C or S
XXVPQDLEPLPIVYY

SEQ ID NO: 3523 - protein, 17 aa, synthetic construct
  REGION 1..17: note = GFR-binding peptide
  VARIANT 3..4: note = Xaa is C or S
KAXXVPTELSPISMLFI

SEQ ID NO: 3524 - protein, 10 aa, synthetic construct
  REGION 1..10: note = GFR-binding peptide
ELEPLTMLYY

SEQ ID NO: 3525 - protein, 19 aa, synthetic construct
  REGION 1..19: note = GFR-binding peptide
  VARIANT 5..6: note = Xaa is C or S
ASKAXXVPTKLSPISILYI

SEQ ID NO: 3526 - protein, 13 aa, synthetic construct
  REGION 1..13: note = GFR-binding peptide
VSQDLSPISILFI

SEQ ID NO: 3527 - protein, 19 aa, synthetic construct
  REGION 1..19: note = GFR-binding peptide
  VARIANT 5..6: note = Xaa is C or S
TPPTXXVPTRLSPISILYI

SEQ ID NO: 3528 - protein, 18 aa, synthetic construct
  REGION 1..18: note = GFR-binding peptide
  VARIANT 4..5: note = Xaa is C or S
ASPXXVPQDLSPISILFI

SEQ ID NO: 3529 - protein, 17 aa, synthetic construct
  REGION 1..17: note = GFR-binding peptide
  VARIANT 3..4: note = Xaa is C or S
APXXVPQALSPISILFI

SEQ ID NO: 3530 - protein, 20 aa, synthetic construct
  REGION 1..20: note = GFR-binding peptide
  VARIANT 7: note = Xaa is C or S
HVTKPTXAPTKLEPLPVVYY

SEQ ID NO: 3531 - protein, 19 aa, synthetic construct
  REGION 1..19: note = GFR-binding peptide
  VARIANT 5..6: note = Xaa is C or S
IPKAXXVPTELEPLTMLYY

SEQ ID NO: 3532 - protein, 15 aa, synthetic construct
  REGION 1..15: note = GFR-binding peptide
  VARIANT 1..2: note = Xaa is C or S
XXVPQALSPISILFI

SEQ ID NO: 3533 - protein, 19 aa, synthetic construct
  REGION 1..19: note = GFR-binding peptide
  VARIANT 5..6: note = Xaa is C or S
VPKPXXAPTQLSPISVLYI

SEQ ID NO: 3534 - protein, 16 aa, synthetic construct
  REGION 1..16: note = GFR-binding peptide
  VARIANT 2..3: note = Xaa is C or S
PXXVPQDLSPISILFI

SEQ ID NO: 3535 - protein, 17 aa, synthetic construct
  REGION 1..17: note = GFR-binding peptide
  VARIANT 3..4: note = Xaa is C or S
KAXXVPTELEPLTMLYY

SEQ ID NO: 3536 - protein, 17 aa, synthetic construct
  REGION 1..17: note = GFR-binding peptide
  VARIANT 3..4: note = Xaa is C or S
KPXXAPTKLEPLPVVYY

SEQ ID NO: 3537 - protein, 16 aa, synthetic construct
  REGION 1..16: note = GFR-binding peptide
  VARIANT 2..3: note = Xaa is C or S
AXXAPTKLSPISVLYI

SEQ ID NO: 3538 - protein, 12 aa, synthetic construct
  REGION 1..12: note = GFR-binding peptide
SQDLEPLPIVYY

SEQ ID NO: 3539 - protein, 9 aa, synthetic construct
  REGION 1..9: note = GFR-binding peptide
LSPISVLYI

SEQ ID NO: 3540 - protein, 16 aa, synthetic construct
  REGION 1..16: note = GFR-binding peptide
  VARIANT 2..3: note = Xaa is C or S
PXXAPTKLSPISVLFI

SEQ ID NO: 3541 - protein, 19 aa, synthetic construct
  REGION 1..19: note = GFR-binding peptide
  VARIANT 5..6: note = Xaa is C or S
VPKPXXAPTKLSPISVLYI

SEQ ID NO: 3542 - protein, 17 aa, synthetic construct
  REGION 1..17: note = GFR-binding peptide
  VARIANT 3..4: note = Xaa is C or S
KAXXVPTKLSPISVLYI

SEQ ID NO: 3543 - protein, 16 aa, synthetic construct
  REGION 1..16: note = GFR-binding peptide
  VARIANT 3: note = Xaa is C or S
PTXAPTKLSPISVLYI

SEQ ID NO: 3544 - protein, 17 aa, synthetic construct
  REGION 1..17: note = GFR-binding peptide
  VARIANT 3..4: note = Xaa is C or S
APXXVPQALEPLTILYY

SEQ ID NO: 3545 - protein, 10 aa, synthetic construct
  REGION 1..10: note = GFR-binding peptide
QLEPLTVLYY

SEQ ID NO: 3546 - protein, 12 aa, synthetic construct
  REGION 1..12: note = GFR-binding peptide
PTRLEPLTILYY

SEQ ID NO: 3547 - protein, 20 aa, synthetic construct
  REGION 1..20: note = GFR-binding peptide
  VARIANT 6..7: note = Xaa is C or S
HVPKPXXAPTKLSPISVLYI

SEQ ID NO: 3548 - protein, 9 aa, synthetic construct
  REGION 1..9: note = GFR-binding peptide
MSPISMLYI

SEQ ID NO: 3549 - protein, 11 aa, synthetic construct
  REGION 1..11: note = GFR-binding peptide
TELEPLTMLYY

SEQ ID NO: 3550 - protein, 11 aa, synthetic construct
  REGION 1..11: note = GFR-binding peptide
TELSPISMLYI

SEQ ID NO: 3551 - protein, 19 aa, synthetic construct
  REGION 1..19: note = GFR-binding peptide
  VARIANT 5..6: note = Xaa is C or S
SASPXXVPQDLEPLPIVYY

SEQ ID NO: 3552 - protein, 19 aa, synthetic construct
  REGION 1..19: note = GFR-binding peptide
  VARIANT 5..6: note = Xaa is C or S
TPPTXXVPTRLEPLTILYY

SEQ ID NO: 3553 - protein, 11 aa, synthetic construct
  REGION 1..11: note = GFR-binding peptide
QALEPLTILYY

SEQ ID NO: 3554 - protein, 11 aa, synthetic construct
  REGION 1..11: note = GFR-binding peptide
TKLSPISVLYI

SEQ ID NO: 3555 - protein, 17 aa, synthetic construct
  REGION 1..17: note = GFR-binding peptide
  VARIANT 3..4: note = Xaa is C or S
KAXXVPTELSPISMLYI

SEQ ID NO: 3556 - protein, 10 aa, synthetic construct
  REGION 1..10: note = GFR-binding peptide
QLSPISVLYI

SEQ ID NO: 3557 - protein, 14 aa, synthetic construct
  REGION 1..14: note = GFR-binding peptide
  VARIANT 1: note = Xaa is C or S
XAPTQLSPISVLFI

SEQ ID NO: 3558 - protein, 12 aa, synthetic construct
  REGION 1..12: note = GFR-binding peptide
PTRLSPISILYI

SEQ ID NO: 3559 - protein, 19 aa, synthetic construct
  REGION 1..19: note = GFR-binding peptide
  VARIANT 5..6: note = Xaa is C or S
VPKPXXAPTQLSPISVLFI

SEQ ID NO: 3560 - protein, 19 aa, synthetic construct
  REGION 1..19: note = GFR-binding peptide
  VARIANT 5..6: note = Xaa is C or S
VPSTXXAPVKTSPISMLYI

SEQ ID NO: 3561 - protein, 11 aa, synthetic construct
  REGION 1..11: note = GFR-binding peptide
QDLSPISILFI

SEQ ID NO: 3562 - protein, 18 aa, synthetic construct
  REGION 1..18: note = GFR-binding peptide
  VARIANT 4..5: note = Xaa is C or S
PKAXXVPTELSPISMLFI

SEQ ID NO: 3563 - protein, 20 aa, synthetic construct
  REGION 1..20: note = GFR-binding peptide
  VARIANT 6..7: note = Xaa is C or S
TVPKPXXAPTQLSPISVLFI

SEQ ID NO: 3564 - protein, 9 aa, synthetic construct
  REGION 1..9: note = GFR-binding peptide
LEPLPMVYY

SEQ ID NO: 3565 - protein, 14 aa, synthetic construct
  REGION 1..14: note = GFR-binding peptide
  VARIANT 1: note = Xaa is C or S
XVSQDLEPLPIVYY

SEQ ID NO: 3566 - protein, 13 aa, synthetic construct
  REGION 1..13: note = GFR-binding peptide
VPTELEPLPMVYY

SEQ ID NO: 3567 - protein, 18 aa, synthetic construct
  REGION 1..18: note = GFR-binding peptide
  VARIANT 4..5: note = Xaa is C or S
GKAXXVPTKLSPISVLYI

SEQ ID NO: 3568 - protein, 11 aa, synthetic construct
  REGION 1..11: note = GFR-binding peptide
TQLSPISVLFI

SEQ ID NO: 3569 - protein, 18 aa, synthetic construct
  REGION 1..18: note = GFR-binding peptide
  VARIANT 4..5: note = Xaa is C or S
AAPXXVPQALSPISILFI

SEQ ID NO: 3570 - protein, 15 aa, synthetic construct
  REGION 1..15: note = GFR-binding peptide
  VARIANT 1..2: note = Xaa is C or S
XXVPTELEPLPMVYY

SEQ ID NO: 3571 - protein, 9 aa, synthetic construct
  REGION 1..9: note = GFR-binding peptide
LEPLTVLYY

SEQ ID NO: 3572 - protein, 17 aa, synthetic construct
  REGION 1..17: note = GFR-binding peptide
  VARIANT 4: note = Xaa is C or S
KPTXAPTKLSPISVLYI

SEQ ID NO: 3573 - protein, 11 aa, synthetic construct
  REGION 1..11: note = GFR-binding peptide
VKTSPISMLYI

SEQ ID NO: 3574 - protein, 20 aa, synthetic construct
  REGION 1..20: note = GFR-binding peptide
  VARIANT 6..7: note = Xaa is C or S
TVPKPXXAPTQLSPISVLYI

SEQ ID NO: 3575 - protein, 20 aa, synthetic construct
  REGION 1..20: note = GFR-binding peptide
  VARIANT 6..7: note = Xaa is C or S
RVPSTXXAPVKTSPISMLYI

SEQ ID NO: 3576 - protein, 13 aa, synthetic construct
  REGION 1..13: note = GFR-binding peptide
APTQLSPISVLFI

SEQ ID NO: 3577 - protein, 17 aa, synthetic construct
  REGION 1..17: note = GFR-binding peptide
  VARIANT 3..4: note = Xaa is C or S
KAXXVPTELEPLPMVYY

SEQ ID NO: 3578 - protein, 11 aa, synthetic construct
  REGION 1..11: note = GFR-binding peptide
TKLEPLTVLYY

SEQ ID NO: 3579 - protein, 14 aa, synthetic construct
  REGION 1..14: note = GFR-binding peptide
  VARIANT 1: note = Xaa is C or S
XVPTKLSPISVLYI

SEQ ID NO: 3580 - protein, 15 aa, synthetic construct
  REGION 1..15: note = GFR-binding peptide
  VARIANT 1..2: note = Xaa is C or S
XXAPTQLEPLPVVYY

SEQ ID NO: 3581 - protein, 18 aa, synthetic construct
  REGION 1..18: note = GFR-binding peptide
  VARIANT 4..5: note = Xaa is C or S
PSTXXAPVKTSPISMLYI

SEQ ID NO: 3582 - protein, 17 aa, synthetic construct
  REGION 1..17: note = GFR-binding peptide
  VARIANT 3..4: note = Xaa is C or S
KPXXAPTKLEPLTVLYY

SEQ ID NO: 3583 - protein, 16 aa, synthetic construct
  REGION 1..16: note = GFR-binding peptide
  VARIANT 2..3: note = Xaa is C or S
PXXAPTQLSPISVLYI

SEQ ID NO: 3584 - protein, 13 aa, synthetic construct
  REGION 1..13: note = GFR-binding peptide
VSQDLEPLPIVYY

SEQ ID NO: 3585 - protein, 15 aa, synthetic construct
  REGION 1..15: note = GFR-binding peptide
  VARIANT 1..2: note = Xaa is C or S
XXVPTKLSPISILYI

SEQ ID NO: 3586 - protein, 20 aa, synthetic construct
  REGION 1..20: note = GFR-binding peptide
  VARIANT 6..7: note = Xaa is C or S
ASAAPXXVPQALEPLTILYY

SEQ ID NO: 3587 - protein, 19 aa, synthetic construct
  REGION 1..19: note = GFR-binding peptide
  VARIANT 5..6: note = Xaa is C or S
SASPXXVSQDLSPISILFI

SEQ ID NO: 3588 - protein, 10 aa, synthetic construct
  REGION 1..10: note = GFR-binding peptide
QLSPISVLFI

SEQ ID NO: 3589 - protein, 14 aa, synthetic construct
  REGION 1..14: note = GFR-binding peptide
  VARIANT 1: note = Xaa is C or S
XVPQDLEPLPIVYY

SEQ ID NO: 3590 - protein, 19 aa, synthetic construct
  REGION 1..19: note = GFR-binding peptide
  VARIANT 5..6: note = Xaa is C or S
VPKPXXAPTQLEPLTVLYY

SEQ ID NO: 3591 - protein, 14 aa, synthetic construct
  REGION 1..14: note = GFR-binding peptide
  VARIANT 1: note = Xaa is C or S
XVPTELEPLTMLYY

SEQ ID NO: 3592 - protein, 18 aa, synthetic construct
  REGION 1..18: note = GFR-binding peptide
  VARIANT 4..5: note = Xaa is C or S
PKPXXAPTQLEPLTVLYY

SEQ ID NO: 3593 - protein, 15 aa, synthetic construct
  REGION 1..15: note = GFR-binding peptide
  VARIANT 1..2: note = Xaa is C or S
XXVPTELSPISMLFI

SEQ ID NO: 3594 - protein, 20 aa, synthetic construct
  REGION 1..20: note = GFR-binding peptide
  VARIANT 6..7: note = Xaa is C or S
TVPKPXXAPTQLEPLPVVYY

SEQ ID NO: 3595 - protein, 20 aa, synthetic construct
  REGION 1..20: note = GFR-binding peptide
  VARIANT 6..7: note = Xaa is C or S
AVPKAXXAPTKLSPISVLYI

SEQ ID NO: 3596 - protein, 16 aa, synthetic construct
  REGION 1..16: note = GFR-binding peptide
  VARIANT 2..3: note = Xaa is C or S
PXXAPTQLEPLPVVYY

SEQ ID NO: 3597 - protein, 10 aa, synthetic construct
  REGION 1..10: note = GFR-binding peptide
ALSPISILFI

SEQ ID NO: 3598 - protein, 15 aa, synthetic construct
  REGION 1..15: note = GFR-binding peptide
  VARIANT 1..2: note = Xaa is C or S
XXVPTRLEPLPIVYY

SEQ ID NO: 3599 - protein, 10 aa, synthetic construct
  REGION 1..10: note = GFR-binding peptide
KTSPISMLYI

SEQ ID NO: 3600 - protein, 20 aa, synthetic construct
  REGION 1..20: note = GFR-binding peptide
  VARIANT 6..7: note = Xaa is C or S
YVPKPXXAPTKLEPLTVLYY

SEQ ID NO: 3601 - protein, 14 aa, synthetic construct
  REGION 1..14: note = GFR-binding peptide
  VARIANT 1: note = Xaa is C or S
XVPTELEPLPMVYY

SEQ ID NO: 3602 - protein, 12 aa, synthetic construct
  REGION 1..12: note = GFR-binding peptide
PVKTSPISMLYI

SEQ ID NO: 3603 - protein, 15 aa, synthetic construct
  REGION 1..15: note = GFR-binding peptide
  VARIANT 1..2: note = Xaa is C or S
XXTPTKMSPISMLYI

SEQ ID NO: 3604 - protein, 17 aa, synthetic construct
  REGION 1..17: note = GFR-binding peptide
  VARIANT 3..4: note = Xaa is C or S
SPXXVPQDLEPLPIVYY

SEQ ID NO: 3605 - protein, 13 aa, synthetic construct
  REGION 1..13: note = GFR-binding peptide
VPQALSPISILFI

SEQ ID NO: 3606 - protein, 14 aa, synthetic construct
  REGION 1..14: note = GFR-binding peptide
  VARIANT 1: note = Xaa is C or S
XAPTKLSPISVLYI

SEQ ID NO: 3607 - protein, 18 aa, synthetic construct
  REGION 1..18: note = GFR-binding peptide
  VARIANT 4..5: note = Xaa is C or S
PKPXXAPTQLSPISVLYI

SEQ ID NO: 3608 - protein, 16 aa, synthetic construct
  REGION 1..16: note = GFR-binding peptide
  VARIANT 2..3: note = Xaa is C or S
PXXVSQDLEPLPIVYY

SEQ ID NO: 3609 - protein, 16 aa, synthetic construct
  REGION 1..16: note = GFR-binding peptide
  VARIANT 2..3: note = Xaa is C or S
PXXTPTKMSPISMLYI

SEQ ID NO: 3610 - protein, 18 aa, synthetic construct
  REGION 1..18: note = GFR-binding peptide
  VARIANT 4..5: note = Xaa is C or S
AAPXXVPQALEPLTILYY

SEQ ID NO: 3611 - protein, 11 aa, synthetic construct
  REGION 1..11: note = GFR-binding peptide
TKLEPLPVVYY

SEQ ID NO: 3612 - protein, 20 aa, synthetic construct
  REGION 1..20: note = GFR-binding peptide
  VARIANT 6..7: note = Xaa is C or S
SIPKAXXVPTELEPLTMLYY

SEQ ID NO: 3613 - protein, 18 aa, synthetic construct
  REGION 1..18: note = GFR-binding peptide
  VARIANT 4..5: note = Xaa is C or S
PPTXXVPTRLSPISILYI

SEQ ID NO: 3614 - protein, 13 aa, synthetic construct
  REGION 1..13: note = GFR-binding peptide
APTQLSPISVLYI

SEQ ID NO: 3615 - protein, 15 aa, synthetic construct
  REGION 1..15: note = GFR-binding peptide
  VARIANT 1..2: note = Xaa is C or S
XXVPTRLSPISILYI

SEQ ID NO: 3616 - protein, 12 aa, synthetic construct
  REGION 1..12: note = GFR-binding peptide
SQDLSPISILFI

SEQ ID NO: 3617 - protein, 13 aa, synthetic construct
  REGION 1..13: note = GFR-binding peptide
VPTKLSPISILYI

SEQ ID NO: 3618 - protein, 19 aa, synthetic construct
  REGION 1..19: note = GFR-binding peptide
  VARIANT 5..6: note = Xaa is C or S
VPKPXXAPTQLEPLPVVYY

SEQ ID NO: 3619 - protein, 9 aa, synthetic construct
  REGION 1..9: note = GFR-binding peptide
LEPLTMLYY

SEQ ID NO: 3620 - protein, 10 aa, synthetic construct
  REGION 1..10: note = GFR-binding peptide
KLEPLTVLYY

SEQ ID NO: 3621 - protein, 15 aa, synthetic construct
  REGION 1..15: note = GFR-binding peptide
  VARIANT 1..2: note = Xaa is C or S
XXAPTQLEPLTVLYY

SEQ ID NO: 3622 - protein, 15 aa, synthetic construct
  REGION 1..15: note = GFR-binding peptide
  VARIANT 1..2: note = Xaa is C or S
XXVSQDLEPLPIVYY

SEQ ID NO: 3623 - protein, 12 aa, synthetic construct
  REGION 1..12: note = GFR-binding peptide
PTELEPLTMLYY

SEQ ID NO: 3624 - protein, 20 aa, synthetic construct
  REGION 1..20: note = GFR-binding peptide
  VARIANT 6..7: note = Xaa is C or S
TVPKPXXAPTQLEPLTVLYY

SEQ ID NO: 3625 - protein, 17 aa, synthetic construct
  REGION 1..17: note = GFR-binding peptide
  VARIANT 3..4: note = Xaa is C or S
KAXXAPTKLSPISVLYI

SEQ ID NO: 3626 - protein, 17 aa, synthetic construct
  REGION 1..17: note = GFR-binding peptide
  VARIANT 3..4: note = Xaa is C or S
SPXXVPQDLSPISILFI

SEQ ID NO: 3627 - protein, 14 aa, synthetic construct
  REGION 1..14: note = GFR-binding peptide
  VARIANT 1: note = Xaa is C or S
XAPTKLSPISVLFI

SEQ ID NO: 3628 - protein, 15 aa, synthetic construct
  REGION 1..15: note = GFR-binding peptide
  VARIANT 1..2: note = Xaa is C or S
XXAPTQLSPISVLYI

SEQ ID NO: 3629 - protein, 13 aa, synthetic construct
  REGION 1..13: note = GFR-binding peptide
VPTRLSPISILYI

SEQ ID NO: 3630 - protein, 12 aa, synthetic construct
  REGION 1..12: note = GFR-binding peptide
PTKLEPLPVVYY

SEQ ID NO: 3631 - protein, 19 aa, synthetic construct
  REGION 1..19: note = GFR-binding peptide
  VARIANT 6: note = Xaa is C or S
VTKPTXAPTKLSPISVLYI

SEQ ID NO: 3632 - protein, 16 aa, synthetic construct
  REGION 1..16: note = GFR-binding peptide
  VARIANT 2..3: note = Xaa is C or S
PXXVPQALSPISILFI

SEQ ID NO: 3633 - protein, 15 aa, synthetic construct
  REGION 1..15: note = GFR-binding peptide
  VARIANT 1..2: note = Xaa is C or S
XXVPTRLEPLTILYY

SEQ ID NO: 3634 - protein, 16 aa, synthetic construct
  REGION 1..16: note = GFR-binding peptide
  VARIANT 2..3: note = Xaa is C or S
PXXAPTQLSPISVLFI

SEQ ID NO: 3635 - protein, 16 aa, synthetic construct
  REGION 1..16: note = GFR-binding peptide
  VARIANT 2..3: note = Xaa is C or S
TXXVPTRLSPISILYI

SEQ ID NO: 3636 - protein, 10 aa, synthetic construct
  REGION 1..10: note = GFR-binding peptide
DLSPISILFI

SEQ ID NO: 3637 - protein, 20 aa, synthetic construct
  REGION 1..20: note = GFR-binding peptide
  VARIANT 6..7: note = Xaa is C or S
KVGKAXXVPTKLSPISVLYI

SEQ ID NO: 3638 - protein, 19 aa, synthetic construct
  REGION 1..19: note = GFR-binding peptide
  VARIANT 5..6: note = Xaa is C or S
VPKPXXAPTKLSPISVLFI

SEQ ID NO: 3639 - protein, 18 aa, synthetic construct
  REGION 1..18: note = GFR-binding peptide
  VARIANT 4..5: note = Xaa is C or S
ASPXXVPQDLEPLPIVYY

SEQ ID NO: 3640 - protein, 15 aa, synthetic construct
  REGION 1..15: note = GFR-binding peptide
  VARIANT 1..2: note = Xaa is C or S
XXVPQDLSPISILFI

SEQ ID NO: 3641 - protein, 19 aa, synthetic construct
  REGION 1..19: note = GFR-binding peptide
  VARIANT 5..6: note = Xaa is C or S
SAAPXXVPQALEPLTILYY

SEQ ID NO: 3642 - protein, 18 aa, synthetic construct
  REGION 1..18: note = GFR-binding peptide
  VARIANT 5: note = Xaa is C or S
TKPTXAPTKLSPISVLYI

SEQ ID NO: 3643 - protein, 14 aa, synthetic construct
  REGION 1..14: note = GFR-binding peptide
  VARIANT 1: note = Xaa is C or S
XVPQDLSPISILFI

SEQ ID NO: 3644 - protein, 15 aa, synthetic construct
  REGION 1..15: note = GFR-binding peptide
  VARIANT 2: note = Xaa is C or S
TXAPTKLSPISVLYI

SEQ ID NO: 3645 - protein, 18 aa, synthetic construct
  REGION 1..18: note = GFR-binding peptide
  VARIANT 4..5: note = Xaa is C or S
PKAXXAPTKLSPISVLYI

SEQ ID NO: 3646 - protein, 12 aa, synthetic construct
  REGION 1..12: note = GFR-binding peptide
PTQLSPISVLFI

SEQ ID NO: 3647 - protein, 12 aa, synthetic construct
  REGION 1..12: note = GFR-binding peptide
PTKLSPISVLFI

SEQ ID NO: 3648 - protein, 12 aa, synthetic construct
  REGION 1..12: note = GFR-binding peptide
PTELSPISMLYI

SEQ ID NO: 3649 - protein, 10 aa, synthetic construct
  REGION 1..10: note = GFR-binding peptide
KLEPLPVVYY

SEQ ID NO: 3650 - protein, 19 aa, synthetic construct
  REGION 1..19: note = GFR-binding peptide
  VARIANT 5..6: note = Xaa is C or S
TPPTXXVPTRLEPLPIVYY

SEQ ID NO: 3651 - protein, 12 aa, synthetic construct
  REGION 1..12: note = GFR-binding peptide
PQALEPLTILYY

SEQ ID NO: 3652 - protein, 9 aa, synthetic construct
  REGION 1..9: note = GFR-binding peptide
LSPISMLYI

SEQ ID NO: 3653 - protein, 20 aa, synthetic construct
  REGION 1..20: note = GFR-binding peptide
  VARIANT 6..7: note = Xaa is C or S
KIPKAXXVPTELSPISMLYI

SEQ ID NO: 3654 - protein, 18 aa, synthetic construct
  REGION 1..18: note = GFR-binding peptide
  VARIANT 4..5: note = Xaa is C or S
AGPXXTPTKMSPISMLYI

SEQ ID NO: 3655 - protein, 16 aa, synthetic construct
  REGION 1..16: note = GFR-binding peptide
  VARIANT 2..3: note = Xaa is C or S
AXXVPTKLSPISVLYI

SEQ ID NO: 3656 - protein, 10 aa, synthetic construct
  REGION 1..10: note = GFR-binding peptide
KLSPISILYI

SEQ ID NO: 3657 - protein, 17 aa, synthetic construct
  REGION 1..17: note = GFR-binding peptide
  VARIANT 3..4: note = Xaa is C or S
PTXXVPTRLEPLTILYY

SEQ ID NO: 3658 - protein, 10 aa, synthetic construct
  REGION 1..10: note = GFR-binding peptide
QLEPLPVVYY

SEQ ID NO: 3659 - protein, 15 aa, synthetic construct
  REGION 1..15: note = GFR-binding peptide
  VARIANT 1..2: note = Xaa is C or S
XXVPTELSPISMLYI

SEQ ID NO: 3660 - protein, 18 aa, synthetic construct
  REGION 1..18: note = GFR-binding peptide
  VARIANT 5: note = Xaa is C or S
TKPTXAPTKLEPLPVVYY

SEQ ID NO: 3661 - protein, 15 aa, synthetic construct
  REGION 1..15: note = GFR-binding peptide
  VARIANT 1..2: note = Xaa is C or S
XXAPTKLSPISVLFI

SEQ ID NO: 3662 - protein, 17 aa, synthetic construct
  REGION 1..17: note = GFR-binding peptide
  VARIANT 3..4: note = Xaa is C or S
KPXXAPTKLSPISVLYI

SEQ ID NO: 3663 - protein, 15 aa, synthetic construct
  REGION 1..15: note = GFR-binding peptide
  VARIANT 1..2: note = Xaa is C or S
XXVPQALEPLTILYY

SEQ ID NO: 3664 - protein, 17 aa, synthetic construct
  REGION 1..17: note = GFR-binding peptide
  VARIANT 3..4: note = Xaa is C or S
KPXXAPTQLSPISVLYI

SEQ ID NO: 3665 - protein, 12 aa, synthetic construct
  REGION 1..12: note = GFR-binding peptide
PTELEPLPMVYY

SEQ ID NO: 3666 - protein, 13 aa, synthetic construct
  REGION 1..13: note = GFR-binding peptide
APTKLEPLTVLYY

SEQ ID NO: 3667 - protein, 20 aa, synthetic construct
  REGION 1..20: note = GFR-binding peptide
  VARIANT 6..7: note = Xaa is C or S
KIPKAXXVPTELEPLPMVYY

SEQ ID NO: 3668 - protein, 18 aa, synthetic construct
  REGION 1..18: note = GFR-binding peptide
  VARIANT 4..5: note = Xaa is C or S
PPTXXVPTRLEPLPIVYY

SEQ ID NO: 3669 - protein, 10 aa, synthetic construct
  REGION 1..10: note = GFR-binding peptide
ALEPLTILYY

SEQ ID NO: 3670 - protein, 14 aa, synthetic construct
  REGION 1..14: note = GFR-binding peptide
  VARIANT 1: note = Xaa is C or S
XVPQALEPLTILYY

SEQ ID NO: 3671 - protein, 17 aa, synthetic construct
  REGION 1..17: note = GFR-binding peptide
  VARIANT 3..4: note = Xaa is C or S
SPXXVSQDLSPISILFI

SEQ ID NO: 3672 - protein, 14 aa, synthetic construct
  REGION 1..14: note = GFR-binding peptide
  VARIANT 1: note = Xaa is C or S
XVPTELSPISMLYI

SEQ ID NO: 3673 - protein, 18 aa, synthetic construct
  REGION 1..18: note = GFR-binding peptide
  VARIANT 4..5: note = Xaa is C or S
PKPXXAPTKLSPISVLFI

SEQ ID NO: 3674 - protein, 13 aa, synthetic construct
  REGION 1..13: note = GFR-binding peptide
APVKTSPISMLYI

SEQ ID NO: 3675 - protein, 9 aa, synthetic construct
  REGION 1..9: note = GFR-binding peptide
TSPISMLYI

SEQ ID NO: 3676 - protein, 18 aa, synthetic construct
  REGION 1..18: note = GFR-binding peptide
  VARIANT 4..5: note = Xaa is C or S
PKPXXAPTQLSPISVLFI

SEQ ID NO: 3677 - protein, 19 aa, synthetic construct
  REGION 1..19: note = GFR-binding peptide
  VARIANT 5..6: note = Xaa is C or S
VGKAXXVPTKLSPISVLYI

SEQ ID NO: 3678 - protein, 16 aa, synthetic construct
  REGION 1..16: note = GFR-binding peptide
  VARIANT 2..3: note = Xaa is C or S
TXXAPVKTSPISMLYI

SEQ ID NO: 3679 - protein, 15 aa, synthetic construct
  REGION 1..15: note = GFR-binding peptide
  VARIANT 1..2: note = Xaa is C or S
XXAPTQLSPISVLFI

SEQ ID NO: 3680 - protein, 19 aa, synthetic construct
  REGION 1..19: note = GFR-binding peptide
  VARIANT 6: note = Xaa is C or S
VTKPTXAPTKLSPISVLFI

SEQ ID NO: 3681 - protein, 18 aa, synthetic construct
  REGION 1..18: note = GFR-binding peptide
  VARIANT 4..5: note = Xaa is C or S
SKAXXVPTKLSPISILYI

SEQ ID NO: 3682 - protein, 18 aa, synthetic construct
  REGION 1..18: note = GFR-binding peptide
  VARIANT 4..5: note = Xaa is C or S
PKPXXAPTKLSPISVLYI

SEQ ID NO: 3683 - protein, 12 aa, synthetic construct
  REGION 1..12: note = GFR-binding peptide
PQALSPISILFI

SEQ ID NO: 3684 - protein, 18 aa, synthetic construct
  REGION 1..18: note = GFR-binding peptide
  VARIANT 5: note = Xaa is C or S
TKPTXAPTKLSPISVLFI

SEQ ID NO: 3685 - protein, 19 aa, synthetic construct
  REGION 1..19: note = GFR-binding peptide
  VARIANT 5..6: note = Xaa is C or S
IPKAXXVPTELEPLPMVYY

SEQ ID NO: 3686 - protein, 15 aa, synthetic construct
  REGION 1..15: note = GFR-binding peptide
  VARIANT 1..2: note = Xaa is C or S
XXAPTKLEPLTVLYY

SEQ ID NO: 3687 - protein, 12 aa, synthetic construct
  REGION 1..12: note = GFR-binding peptide
PTKLEPLTVLYY

SEQ ID NO: 3688 - protein, 12 aa, synthetic construct
  REGION 1..12: note = GFR-binding peptide
PTKLSPISVLYI

SEQ ID NO: 3689 - protein, 20 aa, synthetic construct
  REGION 1..20: note = GFR-binding peptide
  VARIANT 7: note = Xaa is C or S
HVTKPTXAPTKLEPLTVLYY

SEQ ID NO: 3690 - protein, 20 aa, synthetic construct
  REGION 1..20: note = GFR-binding peptide
  VARIANT 7: note = Xaa is C or S
HVTKPTXAPTKLSPISVLYI

SEQ ID NO: 3691 - protein, 11 aa, synthetic construct
  REGION 1..11: note = GFR-binding peptide
TRLSPISILYI

SEQ ID NO: 3692 - protein, 13 aa, synthetic construct
  REGION 1..13: note = GFR-binding peptide
APTKLSPISVLYI

SEQ ID NO: 3693 - protein, 12 aa, synthetic construct
  REGION 1..12: note = GFR-binding peptide
PQDLEPLPIVYY

SEQ ID NO: 3694 - protein, 13 aa, synthetic construct
  REGION 1..13: note = GFR-binding peptide
VPTRLEPLPIVYY

SEQ ID NO: 3695 - protein, 14 aa, synthetic construct
  REGION 1..14: note = GFR-binding peptide
  VARIANT 1: note = Xaa is C or S
XAPTKLEPLPVVYY

SEQ ID NO: 3696 - protein, 12 aa, synthetic construct
  REGION 1..12: note = GFR-binding peptide
PQDLSPISILFI

SEQ ID NO: 3697 - protein, 20 aa, synthetic construct
  REGION 1..20: note = GFR-binding peptide
  VARIANT 6..7: note = Xaa is C or S
KIPKAXXVPTELSPISMLFI

SEQ ID NO: 3698 - protein, 16 aa, synthetic construct
  REGION 1..16: note = GFR-binding peptide
  VARIANT 2..3: note = Xaa is C or S
TXXVPTRLEPLPIVYY

SEQ ID NO: 3699 - protein, 18 aa, synthetic construct
  REGION 1..18: note = GFR-binding peptide
  VARIANT 4..5: note = Xaa is C or S
PKPXXAPTQLEPLPVVYY

SEQ ID NO: 3700 - protein, 15 aa, synthetic construct
  REGION 1..15: note = GFR-binding peptide
  VARIANT 2: note = Xaa is C or S
TXAPTKLEPLTVLYY

SEQ ID NO: 3701 - protein, 10 aa, synthetic construct
  REGION 1..10: note = GFR-binding peptide
ELEPLPMVYY

SEQ ID NO: 3702 - protein, 16 aa, synthetic construct
  REGION 1..16: note = GFR-binding peptide
  VARIANT 2..3: note = Xaa is C or S
PXXAPTQLEPLTVLYY

SEQ ID NO: 3703 - protein, 19 aa, synthetic construct
  REGION 1..19: note = GFR-binding peptide
  VARIANT 5..6: note = Xaa is C or S
SASPXXVSQDLEPLPIVYY

SEQ ID NO: 3704 - protein, 17 aa, synthetic construct
  REGION 1..17: note = GFR-binding peptide
  VARIANT 3..4: note = Xaa is C or S
PTXXVPTRLSPISILYI

SEQ ID NO: 3705 - protein, 19 aa, synthetic construct
  REGION 1..19: note = GFR-binding peptide
  VARIANT 6: note = Xaa is C or S
VTKPTXAPTKLEPLPVVYY

SEQ ID NO: 3706 - protein, 13 aa, synthetic construct
  REGION 1..13: note = GFR-binding peptide
APTQLEPLPVVYY

SEQ ID NO: 3707 - protein, 17 aa, synthetic construct
  REGION 1..17: note = GFR-binding peptide
  VARIANT 3..4: note = Xaa is C or S
KAXXVPTKLSPISILYI

SEQ ID NO: 3708 - protein, 16 aa, synthetic construct
  REGION 1..16: note = GFR-binding peptide
  VARIANT 2..3: note = Xaa is C or S
PXXVSQDLSPISILFI

SEQ ID NO: 3709 - protein, 16 aa, synthetic construct
  REGION 1..16: note = GFR-binding peptide
  VARIANT 2..3: note = Xaa is C or S
AXXVPTELEPLPMVYY

SEQ ID NO: 3710 - protein, 17 aa, synthetic construct
  REGION 1..17: note = GFR-binding peptide
  VARIANT 3..4: note = Xaa is C or S
STXXAPVKTSPISMLYI

SEQ ID NO: 3711 - protein, 12 aa, synthetic construct
  REGION 1..12: note = GFR-binding peptide
PTELSPISMLFI

SEQ ID NO: 3712 - protein, 11 aa, synthetic construct
  REGION 1..11: note = GFR-binding peptide
TRLEPLTILYY

SEQ ID NO: 3713 - protein, 14 aa, synthetic construct
  REGION 1..14: note = GFR-binding peptide
  VARIANT 1: note = Xaa is C or S
XTPTKMSPISMLYI

SEQ ID NO: 3714 - protein, 11 aa, synthetic construct
  REGION 1..11: note = GFR-binding peptide
TKLSPISILYI

SEQ ID NO: 3715 - protein, 18 aa, synthetic construct
  REGION 1..18: note = GFR-binding peptide
  VARIANT 4..5: note = Xaa is C or S
ASPXXVSQDLSPISILFI

SEQ ID NO: 3716 - protein, 17 aa, synthetic construct
  REGION 1..17: note = GFR-binding peptide
  VARIANT 3..4: note = Xaa is C or S
KPXXAPTQLSPISVLFI

SEQ ID NO: 3717 - protein, 20 aa, synthetic construct
  REGION 1..20: note = GFR-binding peptide
  VARIANT 6..7: note = Xaa is C or S
YVPKPXXAPTKLEPLPVVYY

SEQ ID NO: 3718 - protein, 14 aa, synthetic construct
  REGION 1..14: note = GFR-binding peptide
  VARIANT 1: note = Xaa is C or S
XVPTELSPISMLFI

SEQ ID NO: 3719 - protein, 19 aa, synthetic construct
  REGION 1..19: note = GFR-binding peptide
  VARIANT 5..6: note = Xaa is C or S
SAGPXXTPTKMSPISMLYI

SEQ ID NO: 3720 - protein, 12 aa, synthetic construct
  REGION 1..12: note = GFR-binding peptide
PTKMSPISMLYI

SEQ ID NO: 3721 - protein, 14 aa, synthetic construct
  REGION 1..14: note = GFR-binding peptide
  VARIANT 1: note = Xaa is C or S
XVPQALSSLSILFF

SEQ ID NO: 3722 - protein, 20 aa, synthetic construct
  REGION 1..20: note = GFR-binding peptide
  VARIANT 7: note = Xaa is C or S
HVTKPTXAPTKLSSLSVLFF

SEQ ID NO: 3723 - protein, 15 aa, synthetic construct
  REGION 1..15: note = GFR-binding peptide
QPSRVHHSSLSVLFF

SEQ ID NO: 3724 - protein, 13 aa, synthetic construct
  REGION 1..13: note = GFR-binding peptide
APTQLSSLSVLFF

SEQ ID NO: 3725 - protein, 19 aa, synthetic construct
  REGION 1..19: note = GFR-binding peptide
  VARIANT 4: note = Xaa is C or S
SVKXQPSRVHHSSLSVLFF

SEQ ID NO: 3726 - protein, 10 aa, synthetic construct
  REGION 1..10: note = GFR-binding peptide
KMSSLSILFF

SEQ ID NO: 3727 - protein, 12 aa, synthetic construct
  REGION 1..12: note = GFR-binding peptide
PTEESSLSMLFF

SEQ ID NO: 3728 - protein, 16 aa, synthetic construct
  REGION 1..16: note = GFR-binding peptide
  VARIANT 2..3: note = Xaa is C or S
PXXTPTKMSSLSMLFF

SEQ ID NO: 3729 - protein, 17 aa, synthetic construct
  REGION 1..17: note = GFR-binding peptide
  VARIANT 4: note = Xaa is C or S
GLEXVPTEESSLSMLFF

SEQ ID NO: 3730 - protein, 13 aa, synthetic construct
  REGION 1..13: note = GFR-binding peptide
VPTKLSSLSILFF

SEQ ID NO: 3731 - protein, 20 aa, synthetic construct
  REGION 1..20: note = GFR-binding peptide
  VARIANT 6..7: note = Xaa is C or S
GIPEPXXVPEKMSSLSILFF

SEQ ID NO: 3732 - protein, 9 aa, synthetic construct
  REGION 1..9: note = GFR-binding peptide
TSSLSMLFF

SEQ ID NO: 3733 - protein, 13 aa, synthetic construct
  REGION 1..13: note = GFR-binding peptide
APTKLSSLSVLFF

SEQ ID NO: 3734 - protein, 11 aa, synthetic construct
  REGION 1..11: note = GFR-binding peptide
ARLSSLSILFF

SEQ ID NO: 3735 - protein, 17 aa, synthetic construct
  REGION 1..17: note = GFR-binding peptide
  VARIANT 3..4: note = Xaa is C or S
KAXXAPTKLSSLSVLFF

SEQ ID NO: 3736 - protein, 20 aa, synthetic construct
  REGION 1..20: note = GFR-binding peptide
  VARIANT 6..7: note = Xaa is C or S
AAPASXXVPARLSSLSILFF

SEQ ID NO: 3737 - protein, 10 aa, synthetic construct
  REGION 1..10: note = GFR-binding peptide
QLSSLSVLFF

SEQ ID NO: 3738 - protein, 19 aa, synthetic construct
  REGION 1..19: note = GFR-binding peptide
  VARIANT 5..6: note = Xaa is C or S
SASPXXVSQDLSSLSILFF

SEQ ID NO: 3739 - protein, 20 aa, synthetic construct
  REGION 1..20: note = GFR-binding peptide
  VARIANT 7: note = Xaa is C or S
NDEGLEXVPTEESSLSMLFF

SEQ ID NO: 3740 - protein, 17 aa, synthetic construct
  REGION 1..17: note = GFR-binding peptide
  VARIANT 2: note = Xaa is C or S
KXQPSRVHHSSLSVLFF

SEQ ID NO: 3741 - protein, 9 aa, synthetic construct
  REGION 1..9: note = GFR-binding peptide
ESSLSMLFF

SEQ ID NO: 3742 - protein, 19 aa, synthetic construct
  REGION 1..19: note = GFR-binding peptide
  VARIANT 5..6: note = Xaa is C or S
VPKAXXAPTKLSSLSVLFF

SEQ ID NO: 3743 - protein, 15 aa, synthetic construct
  REGION 1..15: note = GFR-binding peptide
  VARIANT 1..2: note = Xaa is C or S
XXVPARLSSLSILFF

SEQ ID NO: 3744 - protein, 16 aa, synthetic construct
  REGION 1..16: note = GFR-binding peptide
  VARIANT 2..3: note = Xaa is C or S
SXXVPARLSSLSILFF

SEQ ID NO: 3745 - protein, 13 aa, synthetic construct
  REGION 1..13: note = GFR-binding peptide
VPTRLSSLSILFF

SEQ ID NO: 3746 - protein, 14 aa, synthetic construct
  REGION 1..14: note = GFR-binding peptide
PSRVHHSSLSVLFF

SEQ ID NO: 3747 - protein, 13 aa, synthetic construct
  REGION 1..13: note = GFR-binding peptide
VPQALSSLSILFF

SEQ ID NO: 3748 - protein, 17 aa, synthetic construct
  REGION 1..17: note = GFR-binding peptide
  VARIANT 3..4: note = Xaa is C or S
KAXXVPTKLSSLSILFF

SEQ ID NO: 3749 - protein, 10 aa, synthetic construct
  REGION 1..10: note = GFR-binding peptide
ALSSLSILFF

SEQ ID NO: 3750 - protein, 14 aa, synthetic construct
  REGION 1..14: note = GFR-binding peptide
  VARIANT 1: note = Xaa is C or S
XTPTKMSSLSMLFF

SEQ ID NO: 3751 - protein, 19 aa, synthetic construct
  REGION 1..19: note = GFR-binding peptide
  VARIANT 5..6: note = Xaa is C or S
IPEPXXVPEKMSSLSILFF

SEQ ID NO: 3752 - protein, 20 aa, synthetic construct
  REGION 1..20: note = GFR-binding peptide
  VARIANT 6..7: note = Xaa is C or S
YVPKPXXAPTKLSSLSVLFF

SEQ ID NO: 3753 - protein, 10 aa, synthetic construct
  REGION 1..10: note = GFR-binding peptide
KLSSLSVLFF

SEQ ID NO: 3754 - protein, 12 aa, synthetic construct
  REGION 1..12: note = GFR-binding peptide
PTKMSSLSMLFF

SEQ ID NO: 3755 - protein, 19 aa, synthetic construct
  REGION 1..19: note = GFR-binding peptide
  VARIANT 5..6: note = Xaa is C or S
SASPXXVPQDLSSLSILFF

SEQ ID NO: 3756 - protein, 10 aa, synthetic construct
  REGION 1..10: note = GFR-binding peptide
RLSSLSILFF

SEQ ID NO: 3757 - protein, 18 aa, synthetic construct
  REGION 1..18: note = GFR-binding peptide
  VARIANT 5: note = Xaa is C or S
EGLEXVPTEESSLSMLFF

SEQ ID NO: 3758 - protein, 17 aa, synthetic construct
  REGION 1..17: note = GFR-binding peptide
  VARIANT 3..4: note = Xaa is C or S
PTXXVPTRLSSLSILFF

SEQ ID NO: 3759 - protein, 16 aa, synthetic construct
  REGION 1..16: note = GFR-binding peptide
  VARIANT 3: note = Xaa is C or S
LEXVPTEESSLSMLFF

SEQ ID NO: 3760 - protein, 14 aa, synthetic construct
  REGION 1..14: note = GFR-binding peptide
  VARIANT 1: note = Xaa is C or S
XVPEKMSSLSILFF

SEQ ID NO: 3761 - protein, 15 aa, synthetic construct
  REGION 1..15: note = GFR-binding peptide
  VARIANT 1..2: note = Xaa is C or S
XXVSQDLSSLSILFF

SEQ ID NO: 3762 - protein, 20 aa, synthetic construct
  REGION 1..20: note = GFR-binding peptide
  VARIANT 6..7: note = Xaa is C or S
KASKAXXVPTKLSSLSILFF

SEQ ID NO: 3763 - protein, 11 aa, synthetic construct
  REGION 1..11: note = GFR-binding peptide
TKMSSLSMLFF

SEQ ID NO: 3764 - protein, 18 aa, synthetic construct
  REGION 1..18: note = GFR-binding peptide
  VARIANT 4..5: note = Xaa is C or S
PASXXVPARLSSLSILFF

SEQ ID NO: 3765 - protein, 17 aa, synthetic construct
  REGION 1..17: note = GFR-binding peptide
  VARIANT 4: note = Xaa is C or S
KPTXAPTKLSSLSVLFF

SEQ ID NO: 3766 - protein, 18 aa, synthetic construct
  REGION 1..18: note = GFR-binding peptide
  VARIANT 4..5: note = Xaa is C or S
PEPXXVPEKMSSLSILFF

SEQ ID NO: 3767 - protein, 16 aa, synthetic construct
  REGION 1..16: note = GFR-binding peptide
  VARIANT 1: note = Xaa is C or S
XQPSRVHHSSLSVLFF

SEQ ID NO: 3768 - protein, 18 aa, synthetic construct
  REGION 1..18: note = GFR-binding peptide
  VARIANT 4..5: note = Xaa is C or S
AGPXXTPTKMSSLSMLFF

SEQ ID NO: 3769 - protein, 20 aa, synthetic construct
  REGION 1..20: note = GFR-binding peptide
  VARIANT 6..7: note = Xaa is C or S
STPPTXXVPTRLSSLSILFF

SEQ ID NO: 3770 - protein, 12 aa, synthetic construct
  REGION 1..12: note = GFR-binding peptide
SQDLSSLSILFF

SEQ ID NO: 3771 - protein, 14 aa, synthetic construct
  REGION 1..14: note = GFR-binding peptide
  VARIANT 1: note = Xaa is C or S
XAPVKTSSLSMLFF

SEQ ID NO: 3772 - protein, 11 aa, synthetic construct
  REGION 1..11: note = GFR-binding peptide
TKLSSLSVLFF

SEQ ID NO: 3773 - protein, 10 aa, synthetic construct
  REGION 1..10: note = GFR-binding peptide
KLSSLSILFF

SEQ ID NO: 3774 - protein, 17 aa, synthetic construct
  REGION 1..17: note = GFR-binding peptide
  VARIANT 3..4: note = Xaa is C or S
ASXXVPARLSSLSILFF

SEQ ID NO: 3775 - protein, 11 aa, synthetic construct
  REGION 1..11: note = GFR-binding peptide
TRLSSLSILFF

SEQ ID NO: 3776 - protein, 14 aa, synthetic construct
  REGION 1..14: note = GFR-binding peptide
  VARIANT 1: note = Xaa is C or S
XAPTKLSSLSVLFF

SEQ ID NO: 3777 - protein, 9 aa, synthetic construct
  REGION 1..9: note = GFR-binding peptide
MSSLSMLFF

SEQ ID NO: 3778 - protein, 19 aa, synthetic construct
  REGION 1..19: note = GFR-binding peptide
  VARIANT 5..6: note = Xaa is C or S
VPKPXXAPTKLSSLSVLFF

SEQ ID NO: 3779 - protein, 19 aa, synthetic construct
  REGION 1..19: note = GFR-binding peptide
  VARIANT 5..6: note = Xaa is C or S
TPPTXXVPTRLSSLSILFF

SEQ ID NO: 3780 - protein, 17 aa, synthetic construct
  REGION 1..17: note = GFR-binding peptide
  VARIANT 3..4: note = Xaa is C or S
SPXXVPQDLSSLSILFF

SEQ ID NO: 3781 - protein, 19 aa, synthetic construct
  REGION 1..19: note = GFR-binding peptide
  VARIANT 6: note = Xaa is C or S
DEGLEXVPTEESSLSMLFF

SEQ ID NO: 3782 - protein, 13 aa, synthetic construct
  REGION 1..13: note = GFR-binding peptide
VPTEESSLSMLFF

SEQ ID NO: 3783 - protein, 11 aa, synthetic construct
  REGION 1..11: note = GFR-binding peptide
VHHSSLSVLFF

SEQ ID NO: 3784 - protein, 17 aa, synthetic construct
  REGION 1..17: note = GFR-binding peptide
  VARIANT 3..4: note = Xaa is C or S
KPXXAPTKLSSLSVLFF

SEQ ID NO: 3785 - protein, 18 aa, synthetic construct
  REGION 1..18: note = GFR-binding peptide
  VARIANT 4..5: note = Xaa is C or S
PKAXXAPTKLSSLSVLFF

SEQ ID NO: 3786 - protein, 19 aa, synthetic construct
  REGION 1..19: note = GFR-binding peptide
  VARIANT 5..6: note = Xaa is C or S
SAAPXXVPQALSSLSILFF

SEQ ID NO: 3787 - protein, 18 aa, synthetic construct
  REGION 1..18: note = GFR-binding peptide
  VARIANT 3: note = Xaa is C or S
VKXQPSRVHHSSLSVLFF

SEQ ID NO: 3788 - protein, 19 aa, synthetic construct
  REGION 1..19: note = GFR-binding peptide
  VARIANT 5..6: note = Xaa is C or S
VGKAXXVPTKLSSLSVLFF

SEQ ID NO: 3789 - protein, 12 aa, synthetic construct
  REGION 1..12: note = GFR-binding peptide
PARLSSLSILFF

SEQ ID NO: 3790 - protein, 10 aa, synthetic construct
  REGION 1..10: note = GFR-binding peptide
EESSLSMLFF

SEQ ID NO: 3791 - protein, 16 aa, synthetic construct
  REGION 1..16: note = GFR-binding peptide
  VARIANT 2..3: note = Xaa is C or S
PXXVPQALSSLSILFF

SEQ ID NO: 3792 - protein, 20 aa, synthetic construct
  REGION 1..20: note = GFR-binding peptide
  VARIANT 6..7: note = Xaa is C or S
ASASPXXVPQDLSSLSILFF

SEQ ID NO: 3793 - protein, 16 aa, synthetic construct
  REGION 1..16: note = GFR-binding peptide
  VARIANT 2..3: note = Xaa is C or S
PXXAPTQLSSLSVLFF

SEQ ID NO: 3794 - protein, 19 aa, synthetic construct
  REGION 1..19: note = GFR-binding peptide
  VARIANT 5..6: note = Xaa is C or S
ASKAXXVPTKLSSLSILFF

SEQ ID NO: 3795 - protein, 15 aa, synthetic construct
  REGION 1..15: note = GFR-binding peptide
  VARIANT 1..2: note = Xaa is C or S
XXVPQDLSSLSILFF

SEQ ID NO: 3796 - protein, 15 aa, synthetic construct
  REGION 1..15: note = GFR-binding peptide
  VARIANT 2: note = Xaa is C or S
EXVPTEESSLSMLFF

SEQ ID NO: 3797 - protein, 12 aa, synthetic construct
  REGION 1..12: note = GFR-binding peptide
PEKMSSLSILFF

SEQ ID NO: 3798 - protein, 10 aa, synthetic construct
  REGION 1..10: note = GFR-binding peptide
DLSSLSILFF

SEQ ID NO: 3799 - protein, 14 aa, synthetic construct
  REGION 1..14: note = GFR-binding peptide
  VARIANT 1: note = Xaa is C or S
XVPARLSSLSILFF

SEQ ID NO: 3800 - protein, 17 aa, synthetic construct
  REGION 1..17: note = GFR-binding peptide
  VARIANT 3..4: note = Xaa is C or S
KAXXVPTKLSSLSVLFF

SEQ ID NO: 3801 - protein, 20 aa, synthetic construct
  REGION 1..20: note = GFR-binding peptide
  VARIANT 6..7: note = Xaa is C or S
AVPKAXXAPTKLSSLSVLFF

SEQ ID NO: 3802 - protein, 15 aa, synthetic construct
  REGION 1..15: note = GFR-binding peptide
  VARIANT 2: note = Xaa is C or S
TXAPTKLSSLSVLFF

SEQ ID NO: 3803 - protein, 13 aa, synthetic construct
  REGION 1..13: note = GFR-binding peptide
VPQDLSSLSILFF

SEQ ID NO: 3804 - protein, 19 aa, synthetic construct
  REGION 1..19: note = GFR-binding peptide
  VARIANT 5..6: note = Xaa is C or S
SAGPXXTPTKMSSLSMLFF

SEQ ID NO: 3805 - protein, 20 aa, synthetic construct
  REGION 1..20: note = GFR-binding peptide
  VARIANT 6..7: note = Xaa is C or S
HVPKPXXAPTKLSSLSVLFF

SEQ ID NO: 3806 - protein, 13 aa, synthetic construct
  REGION 1..13: note = GFR-binding peptide
VPARLSSLSILFF

SEQ ID NO: 3807 - protein, 12 aa, synthetic construct
  REGION 1..12: note = GFR-binding peptide
PTKLSSLSVLFF

SEQ ID NO: 3808 - protein, 15 aa, synthetic construct
  REGION 1..15: note = GFR-binding peptide
  VARIANT 1..2: note = Xaa is C or S
XXVPTRLSSLSILFF

SEQ ID NO: 3809 - protein, 13 aa, synthetic construct
  REGION 1..13: note = GFR-binding peptide
SRVHHSSLSVLFF

SEQ ID NO: 3810 - protein, 14 aa, synthetic construct
  REGION 1..14: note = GFR-binding peptide
  VARIANT 1: note = Xaa is C or S
XVPQDLSSLSILFF

SEQ ID NO: 3811 - protein, 16 aa, synthetic construct
  REGION 1..16: note = GFR-binding peptide
  VARIANT 2..3: note = Xaa is C or S
AXXVPTKLSSLSILFF

SEQ ID NO: 3812 - protein, 9 aa, synthetic construct
  REGION 1..9: note = GFR-binding peptide
HSSLSVLFF

SEQ ID NO: 3813 - protein, 12 aa, synthetic construct
  REGION 1..12: note = GFR-binding peptide
PTRLSSLSILFF

SEQ ID NO: 3814 - protein, 18 aa, synthetic construct
  REGION 1..18: note = GFR-binding peptide
  VARIANT 4..5: note = Xaa is C or S
PKPXXAPTKLSSLSVLFF

SEQ ID NO: 3815 - protein, 17 aa, synthetic construct
  REGION 1..17: note = GFR-binding peptide
  VARIANT 3..4: note = Xaa is C or S
APXXVPQALSSLSILFF

SEQ ID NO: 3816 - protein, 16 aa, synthetic construct
  REGION 1..16: note = GFR-binding peptide
  VARIANT 2..3: note = Xaa is C or S
PXXVPEKMSSLSILFF

SEQ ID NO: 3817 - protein, 15 aa, synthetic construct
  REGION 1..15: note = GFR-binding peptide
  VARIANT 1..2: note = Xaa is C or S
XXVPTKLSSLSVLFF

SEQ ID NO: 3818 - protein, 16 aa, synthetic construct
  REGION 1..16: note = GFR-binding peptide
  VARIANT 3: note = Xaa is C or S
PTXAPTKLSSLSVLFF

SEQ ID NO: 3819 - protein, 15 aa, synthetic construct
  REGION 1..15: note = GFR-binding peptide
  VARIANT 1..2: note = Xaa is C or S
XXVPEKMSSLSILFF

SEQ ID NO: 3820 - protein, 14 aa, synthetic construct
  REGION 1..14: note = GFR-binding peptide
  VARIANT 1: note = Xaa is C or S
XVSQDLSSLSILFF

SEQ ID NO: 3821 - protein, 10 aa, synthetic construct
  REGION 1..10: note = GFR-binding peptide
KMSSLSMLFF

SEQ ID NO: 3822 - protein, 9 aa, synthetic construct
  REGION 1..9: note = GFR-binding peptide
LSSLSVLFF

SEQ ID NO: 3823 - protein, 13 aa, synthetic construct
  REGION 1..13: note = GFR-binding peptide
VSQDLSSLSILFF

SEQ ID NO: 3824 - protein, 11 aa, synthetic construct
  REGION 1..11: note = GFR-binding peptide
VKTSSLSMLFF

SEQ ID NO: 3825 - protein, 15 aa, synthetic construct
  REGION 1..15: note = GFR-binding peptide
  VARIANT 1..2: note = Xaa is C or S
XXVPTKLSSLSILFF

SEQ ID NO: 3826 - protein, 11 aa, synthetic construct
  REGION 1..11: note = GFR-binding peptide
QALSSLSILFF

SEQ ID NO: 3827 - protein, 19 aa, synthetic construct
  REGION 1..19: note = GFR-binding peptide
  VARIANT 5..6: note = Xaa is C or S
APASXXVPARLSSLSILFF

SEQ ID NO: 3828 - protein, 15 aa, synthetic construct
  REGION 1..15: note = GFR-binding peptide
  VARIANT 1..2: note = Xaa is C or S
XXAPTKLSSLSVLFF

SEQ ID NO: 3829 - protein, 11 aa, synthetic construct
  REGION 1..11: note = GFR-binding peptide
EKMSSLSILFF

SEQ ID NO: 3830 - protein, 16 aa, synthetic construct
  REGION 1..16: note = GFR-binding peptide
  VARIANT 2..3: note = Xaa is C or S
AXXAPTKLSSLSVLFF

SEQ ID NO: 3831 - protein, 16 aa, synthetic construct
  REGION 1..16: note = GFR-binding peptide
  VARIANT 2..3: note = Xaa is C or S
PXXVPQDLSSLSILFF

SEQ ID NO: 3832 - protein, 18 aa, synthetic construct
  REGION 1..18: note = GFR-binding peptide
  VARIANT 4..5: note = Xaa is C or S
ASPXXVPQDLSSLSILFF

SEQ ID NO: 3833 - protein, 17 aa, synthetic construct
  REGION 1..17: note = GFR-binding peptide
  VARIANT 3..4: note = Xaa is C or S
SPXXVSQDLSSLSILFF

SEQ ID NO: 3834 - protein, 9 aa, synthetic construct
  REGION 1..9: note = GFR-binding peptide
LSSLSILFF

SEQ ID NO: 3835 - protein, 20 aa, synthetic construct
  REGION 1..20: note = GFR-binding peptide
  VARIANT 6..7: note = Xaa is C or S
KVGKAXXVPTKLSSLSVLFF

SEQ ID NO: 3836 - protein, 19 aa, synthetic construct
  REGION 1..19: note = GFR-binding peptide
  VARIANT 5..6: note = Xaa is C or S
VPSTXXAPVKTSSLSMLFF

SEQ ID NO: 3837 - protein, 17 aa, synthetic construct
  REGION 1..17: note = GFR-binding peptide
  VARIANT 3..4: note = Xaa is C or S
STXXAPVKTSSLSMLFF

SEQ ID NO: 3838 - protein, 15 aa, synthetic construct
  REGION 1..15: note = GFR-binding peptide
  VARIANT 1..2: note = Xaa is C or S
XXVPQALSSLSILFF

SEQ ID NO: 3839 - protein, 20 aa, synthetic construct
  REGION 1..20: note = GFR-binding peptide
  VARIANT 6..7: note = Xaa is C or S
ASASPXXVSQDLSSLSILFF

SEQ ID NO: 3840 - protein, 18 aa, synthetic construct
  REGION 1..18: note = GFR-binding peptide
  VARIANT 4..5: note = Xaa is C or S
GKAXXVPTKLSSLSVLFF

SEQ ID NO: 3841 - protein, 18 aa, synthetic construct
  REGION 1..18: note = GFR-binding peptide
  VARIANT 4..5: note = Xaa is C or S
PKPXXAPTQLSSLSVLFF

SEQ ID NO: 3842 - protein, 15 aa, synthetic construct
  REGION 1..15: note = GFR-binding peptide
  VARIANT 1..2: note = Xaa is C or S
XXAPTQLSSLSVLFF

SEQ ID NO: 3843 - protein, 12 aa, synthetic construct
  REGION 1..12: note = GFR-binding peptide
PTQLSSLSVLFF

SEQ ID NO: 3844 - protein, 11 aa, synthetic construct
  REGION 1..11: note = GFR-binding peptide
TKLSSLSILFF

SEQ ID NO: 3845 - protein, 13 aa, synthetic construct
  REGION 1..13: note = GFR-binding peptide
TPTKMSSLSMLFF

SEQ ID NO: 3846 - protein, 19 aa, synthetic construct
  REGION 1..19: note = GFR-binding peptide
  VARIANT 6: note = Xaa is C or S
VTKPTXAPTKLSSLSVLFF

SEQ ID NO: 3847 - protein, 17 aa, synthetic construct
  REGION 1..17: note = GFR-binding peptide
  VARIANT 3..4: note = Xaa is C or S
GPXXTPTKMSSLSMLFF

SEQ ID NO: 3848 - protein, 20 aa, synthetic construct
  REGION 1..20: note = GFR-binding peptide
  VARIANT 6..7: note = Xaa is C or S
ASAAPXXVPQALSSLSILFF

SEQ ID NO: 3849 - protein, 14 aa, synthetic construct
  REGION 1..14: note = GFR-binding peptide
  VARIANT 1: note = Xaa is C or S
XVPTEESSLSMLFF

SEQ ID NO: 3850 - protein, 16 aa, synthetic construct
  REGION 1..16: note = GFR-binding peptide
  VARIANT 2..3: note = Xaa is C or S
TXXVPTRLSSLSILFF

SEQ ID NO: 3851 - protein, 13 aa, synthetic construct
  REGION 1..13: note = GFR-binding peptide
APVKTSSLSMLFF

SEQ ID NO: 3852 - protein, 12 aa, synthetic construct
  REGION 1..12: note = GFR-binding peptide
PQALSSLSILFF

SEQ ID NO: 3853 - protein, 14 aa, synthetic construct
  REGION 1..14: note = GFR-binding peptide
  VARIANT 1: note = Xaa is C or S
XVPTKLSSLSVLFF

SEQ ID NO: 3854 - protein, 12 aa, synthetic construct
  REGION 1..12: note = GFR-binding peptide
PTKLSSLSILFF

SEQ ID NO: 3855 - protein, 16 aa, synthetic construct
  REGION 1..16: note = GFR-binding peptide
  VARIANT 2..3: note = Xaa is C or S
AXXVPTKLSSLSVLFF

SEQ ID NO: 3856 - protein, 14 aa, synthetic construct
  REGION 1..14: note = GFR-binding peptide
  VARIANT 1: note = Xaa is C or S
XVPTRLSSLSILFF

SEQ ID NO: 3857 - protein, 13 aa, synthetic construct
  REGION 1..13: note = GFR-binding peptide
VPTKLSSLSVLFF

SEQ ID NO: 3858 - protein, 16 aa, synthetic construct
  REGION 1..16: note = GFR-binding peptide
  VARIANT 2..3: note = Xaa is C or S
PXXAPTKLSSLSVLFF

SEQ ID NO: 3859 - protein, 12 aa, synthetic construct
  REGION 1..12: note = GFR-binding peptide
PVKTSSLSMLFF

SEQ ID NO: 3860 - protein, 12 aa, synthetic construct
  REGION 1..12: note = GFR-binding peptide
PQDLSSLSILFF

SEQ ID NO: 3861 - protein, 11 aa, synthetic construct
  REGION 1..11: note = GFR-binding peptide
TEESSLSMLFF

SEQ ID NO: 3862 - protein, 13 aa, synthetic construct
  REGION 1..13: note = GFR-binding peptide
VPEKMSSLSILFF

SEQ ID NO: 3863 - protein, 20 aa, synthetic construct
  REGION 1..20: note = GFR-binding peptide
  VARIANT 5: note = Xaa is C or S
SSVKXQPSRVHHSSLSVLFF

SEQ ID NO: 3864 - protein, 12 aa, synthetic construct
  REGION 1..12: note = GFR-binding peptide
RVHHSSLSVLFF

SEQ ID NO: 3865 - protein, 10 aa, synthetic construct
  REGION 1..10: note = GFR-binding peptide
KTSSLSMLFF

SEQ ID NO: 3866 - protein, 18 aa, synthetic construct
  REGION 1..18: note = GFR-binding peptide
  VARIANT 4..5: note = Xaa is C or S
PSTXXAPVKTSSLSMLFF

SEQ ID NO: 3867 - protein, 15 aa, synthetic construct
  REGION 1..15: note = GFR-binding peptide
  VARIANT 1..2: note = Xaa is C or S
XXTPTKMSSLSMLFF

SEQ ID NO: 3868 - protein, 16 aa, synthetic construct
  REGION 1..16: note = GFR-binding peptide
  VARIANT 2..3: note = Xaa is C or S
PXXVSQDLSSLSILFF

SEQ ID NO: 3869 - protein, 10 aa, synthetic construct
  REGION 1..10: note = GFR-binding peptide
HHSSLSVLFF

SEQ ID NO: 3870 - protein, 17 aa, synthetic construct
  REGION 1..17: note = GFR-binding peptide
  VARIANT 3..4: note = Xaa is C or S
EPXXVPEKMSSLSILFF

SEQ ID NO: 3871 - protein, 15 aa, synthetic construct
  REGION 1..15: note = GFR-binding peptide
  VARIANT 1..2: note = Xaa is C or S
XXAPVKTSSLSMLFF

SEQ ID NO: 3872 - protein, 11 aa, synthetic construct
  REGION 1..11: note = GFR-binding peptide
TQLSSLSVLFF

SEQ ID NO: 3873 - protein, 9 aa, synthetic construct
  REGION 1..9: note = GFR-binding peptide
MSSLSILFF

SEQ ID NO: 3874 - protein, 14 aa, synthetic construct
  REGION 1..14: note = GFR-binding peptide
  VARIANT 1: note = Xaa is C or S
XAPTQLSSLSVLFF

SEQ ID NO: 3875 - protein, 11 aa, synthetic construct
  REGION 1..11: note = GFR-binding peptide
QDLSSLSILFF

SEQ ID NO: 3876 - protein, 18 aa, synthetic construct
  REGION 1..18: note = GFR-binding peptide
  VARIANT 4..5: note = Xaa is C or S
SKAXXVPTKLSSLSILFF

SEQ ID NO: 3877 - protein, 18 aa, synthetic construct
  REGION 1..18: note = GFR-binding peptide
  VARIANT 5: note = Xaa is C or S
TKPTXAPTKLSSLSVLFF

SEQ ID NO: 3878 - protein, 14 aa, synthetic construct
  REGION 1..14: note = GFR-binding peptide
  VARIANT 1: note = Xaa is C or S
XVPTKLSSLSILFF

SEQ ID NO: 3879 - protein, 16 aa, synthetic construct
  REGION 1..16: note = GFR-binding peptide
  VARIANT 2..3: note = Xaa is C or S
TXXAPVKTSSLSMLFF

SEQ ID NO: 3880 - protein, 20 aa, synthetic construct
  REGION 1..20: note = GFR-binding peptide
  VARIANT 6..7: note = Xaa is C or S
TVPKPXXAPTQLSSLSVLFF

SEQ ID NO: 3881 - protein, 18 aa, synthetic construct
  REGION 1..18: note = GFR-binding peptide
  VARIANT 4..5: note = Xaa is C or S
AAPXXVPQALSSLSILFF

SEQ ID NO: 3882 - protein, 19 aa, synthetic construct
  REGION 1..19: note = GFR-binding peptide
  VARIANT 5..6: note = Xaa is C or S
VPKPXXAPTQLSSLSVLFF

SEQ ID NO: 3883 - protein, 18 aa, synthetic construct
  REGION 1..18: note = GFR-binding peptide
  VARIANT 4..5: note = Xaa is C or S
PPTXXVPTRLSSLSILFF

SEQ ID NO: 3884 - protein, 18 aa, synthetic construct
  REGION 1..18: note = GFR-binding peptide
  VARIANT 4..5: note = Xaa is C or S
ASPXXVSQDLSSLSILFF

SEQ ID NO: 3885 - protein, 17 aa, synthetic construct
  REGION 1..17: note = GFR-binding peptide
  VARIANT 3..4: note = Xaa is C or S
KPXXAPTQLSSLSVLFF

SEQ ID NO: 3886 - protein, 14 aa, synthetic construct
  REGION 1..14: note = GFR-binding peptide
  VARIANT 14: note = Xaa is C or S
FFLISLSSLAQPVX

SEQ ID NO: 3887 - protein, 11 aa, synthetic construct
  REGION 1..11: note = GFR-binding peptide
FFLMSLSSLET

SEQ ID NO: 3888 - protein, 20 aa, synthetic construct
  REGION 1..20: note = GFR-binding peptide
  VARIANT 14: note = Xaa is C or S
FFLVSLSSLKTPAXTPKTVH

SEQ ID NO: 3889 - protein, 15 aa, synthetic construct
  REGION 1..15: note = GFR-binding peptide
FFLVSLSSHHVRSPQ

SEQ ID NO: 3890 - protein, 13 aa, synthetic construct
  REGION 1..13: note = GFR-binding peptide
FFLVSLSSLQTPA

SEQ ID NO: 3891 - protein, 19 aa, synthetic construct
  REGION 1..19: note = GFR-binding peptide
  VARIANT 16: note = Xaa is C or S
FFLVSLSSHHVRSPQXKVS

SEQ ID NO: 3892 - protein, 10 aa, synthetic construct
  REGION 1..10: note = GFR-binding peptide
FFLISLSSMK

SEQ ID NO: 3893 - protein, 12 aa, synthetic construct
  REGION 1..12: note = GFR-binding peptide
FFLMSLSSEETP

SEQ ID NO: 3894 - protein, 16 aa, synthetic construct
  REGION 1..16: note = GFR-binding peptide
  VARIANT 14..15: note = Xaa is C or S
FFLMSLSSMKTPTXXP

SEQ ID NO: 3895 - protein, 17 aa, synthetic construct
  REGION 1..17: note = GFR-binding peptide
  VARIANT 14: note = Xaa is C or S
FFLMSLSSEETPVXELG

SEQ ID NO: 3896 - protein, 13 aa, synthetic construct
  REGION 1..13: note = GFR-binding peptide
FFLISLSSLKTPV

SEQ ID NO: 3897 - protein, 20 aa, synthetic construct
  REGION 1..20: note = GFR-binding peptide
  VARIANT 14..15: note = Xaa is C or S
FFLISLSSMKEPVXXPEPIG

SEQ ID NO: 3898 - protein, 9 aa, synthetic construct
  REGION 1..9: note = GFR-binding peptide
FFLMSLSST

SEQ ID NO: 3899 - protein, 13 aa, synthetic construct
  REGION 1..13: note = GFR-binding peptide
FFLVSLSSLKTPA

SEQ ID NO: 3900 - protein, 11 aa, synthetic construct
  REGION 1..11: note = GFR-binding peptide
FFLISLSSLRA

SEQ ID NO: 3901 - protein, 17 aa, synthetic construct
  REGION 1..17: note = GFR-binding peptide
  VARIANT 14..15: note = Xaa is C or S
FFLVSLSSLKTPAXXAK

SEQ ID NO: 3902 - protein, 20 aa, synthetic construct
  REGION 1..20: note = GFR-binding peptide
  VARIANT 14..15: note = Xaa is C or S
FFLISLSSLRAPVXXSAPAA

SEQ ID NO: 3903 - protein, 10 aa, synthetic construct
  REGION 1..10: note = GFR-binding peptide
FFLVSLSSLQ

SEQ ID NO: 3904 - protein, 19 aa, synthetic construct
  REGION 1..19: note = GFR-binding peptide
  VARIANT 14..15: note = Xaa is C or S
FFLISLSSLDQSVXXPSAS

SEQ ID NO: 3905 - protein, 17 aa, synthetic construct
  REGION 1..17: note = GFR-binding peptide
  VARIANT 16: note = Xaa is C or S
FFLVSLSSHHVRSPQXK

SEQ ID NO: 3906 - protein, 9 aa, synthetic construct
  REGION 1..9: note = GFR-binding peptide
FFLMSLSSE

SEQ ID NO: 3907 - protein, 19 aa, synthetic construct
  REGION 1..19: note = GFR-binding peptide
  VARIANT 14..15: note = Xaa is C or S
FFLVSLSSLKTPAXXAKPV

SEQ ID NO: 3908 - protein, 15 aa, synthetic construct
  REGION 1..15: note = GFR-binding peptide
  VARIANT 14..15: note = Xaa is C or S
FFLISLSSLRAPVXX

SEQ ID NO: 3909 - protein, 16 aa, synthetic construct
  REGION 1..16: note = GFR-binding peptide
  VARIANT 14..15: note = Xaa is C or S
FFLISLSSLRAPVXXS

SEQ ID NO: 3910 - protein, 13 aa, synthetic construct
  REGION 1..13: note = GFR-binding peptide
FFLISLSSLRTPV

SEQ ID NO: 3911 - protein, 15 aa, synthetic construct
  REGION 1..15: note = GFR-binding peptide
  VARIANT 14..15: note = Xaa is C or S
FFLMSLSSLETPVXX

SEQ ID NO: 3912 - protein, 14 aa, synthetic construct
  REGION 1..14: note = GFR-binding peptide
FFLVSLSSHHVRSP

SEQ ID NO: 3913 - protein, 13 aa, synthetic construct
  REGION 1..13: note = GFR-binding peptide
FFLISLSSLAQPV

SEQ ID NO: 3914 - protein, 17 aa, synthetic construct
  REGION 1..17: note = GFR-binding peptide
  VARIANT 14..15: note = Xaa is C or S
FFLISLSSLKTPVXXAK

SEQ ID NO: 3915 - protein, 10 aa, synthetic construct
  REGION 1..10: note = GFR-binding peptide
FFLISLSSLA

SEQ ID NO: 3916 - protein, 14 aa, synthetic construct
  REGION 1..14: note = GFR-binding peptide
  VARIANT 14: note = Xaa is C or S
FFLMSLSSMKTPTX

SEQ ID NO: 3917 - protein, 19 aa, synthetic construct
  REGION 1..19: note = GFR-binding peptide
  VARIANT 14..15: note = Xaa is C or S
FFLISLSSMKEPVXXPEPI

SEQ ID NO: 3918 - protein, 20 aa, synthetic construct
  REGION 1..20: note = GFR-binding peptide
  VARIANT 14..15: note = Xaa is C or S
FFLVSLSSLKTPAXXPKPVY

SEQ ID NO: 3919 - protein, 10 aa, synthetic construct
  REGION 1..10: note = GFR-binding peptide
FFLVSLSSLK

SEQ ID NO: 3920 - protein, 12 aa, synthetic construct
  REGION 1..12: note = GFR-binding peptide
FFLMSLSSMKTP

SEQ ID NO: 3921 - protein, 20 aa, synthetic construct
  REGION 1..20: note = GFR-binding peptide
  VARIANT 14..15: note = Xaa is C or S
FFLMSLSSLETPVXXAKPIS

SEQ ID NO: 3922 - protein, 19 aa, synthetic construct
  REGION 1..19: note = GFR-binding peptide
  VARIANT 14..15: note = Xaa is C or S
FFLISLSSLDQPVXXPSAS

SEQ ID NO: 3923 - protein, 9 aa, synthetic construct
  REGION 1..9: note = GFR-binding peptide
FFLMSLSSL

SEQ ID NO: 3924 - protein, 10 aa, synthetic construct
  REGION 1..10: note = GFR-binding peptide
FFLISLSSLR

SEQ ID NO: 3925 - protein, 18 aa, synthetic construct
  REGION 1..18: note = GFR-binding peptide
  VARIANT 14: note = Xaa is C or S
FFLMSLSSEETPVXELGE

SEQ ID NO: 3926 - protein, 17 aa, synthetic construct
  REGION 1..17: note = GFR-binding peptide
  VARIANT 14..15: note = Xaa is C or S
FFLISLSSLRTPVXXTP

SEQ ID NO: 3927 - protein, 16 aa, synthetic construct
  REGION 1..16: note = GFR-binding peptide
  VARIANT 14: note = Xaa is C or S
FFLMSLSSEETPVXEL

SEQ ID NO: 3928 - protein, 16 aa, synthetic construct
  REGION 1..16: note = GFR-binding peptide
  VARIANT 14..15: note = Xaa is C or S
FFLMSLSSLETPVXXA

SEQ ID NO: 3929 - protein, 14 aa, synthetic construct
  REGION 1..14: note = GFR-binding peptide
  VARIANT 14: note = Xaa is C or S
FFLISLSSMKEPVX

SEQ ID NO: 3930 - protein, 15 aa, synthetic construct
  REGION 1..15: note = GFR-binding peptide
  VARIANT 14..15: note = Xaa is C or S
FFLISLSSLDQSVXX

SEQ ID NO: 3931 - protein, 20 aa, synthetic construct
  REGION 1..20: note = GFR-binding peptide
  VARIANT 14..15: note = Xaa is C or S
FFLISLSSLKTPVXXAKSAK

SEQ ID NO: 3932 - protein, 11 aa, synthetic construct
  REGION 1..11: note = GFR-binding peptide
FFLMSLSSMKT

SEQ ID NO: 3933 - protein, 18 aa, synthetic construct
  REGION 1..18: note = GFR-binding peptide
  VARIANT 14..15: note = Xaa is C or S
FFLISLSSLRAPVXXSAP

SEQ ID NO: 3934 - protein, 17 aa, synthetic construct
  REGION 1..17: note = GFR-binding peptide
  VARIANT 14: note = Xaa is C or S
FFLVSLSSLKTPAXTPK

SEQ ID NO: 3935 - protein, 18 aa, synthetic construct
  REGION 1..18: note = GFR-binding peptide
  VARIANT 14..15: note = Xaa is C or S
FFLISLSSMKEPVXXPEP

SEQ ID NO: 3936 - protein, 16 aa, synthetic construct
  REGION 1..16: note = GFR-binding peptide
  VARIANT 16: note = Xaa is C or S
FFLVSLSSHHVRSPQX

SEQ ID NO: 3937 - protein, 18 aa, synthetic construct
  REGION 1..18: note = GFR-binding peptide
  VARIANT 14..15: note = Xaa is C or S
FFLMSLSSMKTPTXXPGA

SEQ ID NO: 3938 - protein, 10 aa, synthetic construct
  REGION 1..10: note = GFR-binding peptide
FFLMSLSSLE

SEQ ID NO: 3939 - protein, 20 aa, synthetic construct
  REGION 1..20: note = GFR-binding peptide
  VARIANT 14..15: note = Xaa is C or S
FFLISLSSLRTPVXXTPPTS

SEQ ID NO: 3940 - protein, 12 aa, synthetic construct
  REGION 1..12: note = GFR-binding peptide
FFLISLSSLDQS

SEQ ID NO: 3941 - protein, 14 aa, synthetic construct
  REGION 1..14: note = GFR-binding peptide
  VARIANT 14: note = Xaa is C or S
FFLMSLSSTKVPAX

SEQ ID NO: 3942 - protein, 8 aa, synthetic construct
  REGION 1..8: note = GFR-binding peptide
FFLMSLSS

SEQ ID NO: 3943 - protein, 11 aa, synthetic construct
  REGION 1..11: note = GFR-binding peptide
FFLVSLSSLKT

SEQ ID NO: 3944 - protein, 10 aa, synthetic construct
  REGION 1..10: note = GFR-binding peptide
FFLISLSSLK

SEQ ID NO: 3945 - protein, 19 aa, synthetic construct
  REGION 1..19: note = GFR-binding peptide
  VARIANT 14..15: note = Xaa is C or S
FFLMSLSSLETPVXXAKPI

SEQ ID NO: 3946 - protein, 17 aa, synthetic construct
  REGION 1..17: note = GFR-binding peptide
  VARIANT 14..15: note = Xaa is C or S
FFLISLSSLRAPVXXSA

SEQ ID NO: 3947 - protein, 11 aa, synthetic construct
  REGION 1..11: note = GFR-binding peptide
FFLISLSSLRT

SEQ ID NO: 3948 - protein, 14 aa, synthetic construct
  REGION 1..14: note = GFR-binding peptide
  VARIANT 14: note = Xaa is C or S
FFLVSLSSLKTPAX

SEQ ID NO: 3949 - protein, 9 aa, synthetic construct
  REGION 1..9: note = GFR-binding peptide
FFLMSLSSM

SEQ ID NO: 3950 - protein, 19 aa, synthetic construct
  REGION 1..19: note = GFR-binding peptide
  VARIANT 14..15: note = Xaa is C or S
FFLVSLSSLKTPAXXPKPV

SEQ ID NO: 3951 - protein, 19 aa, synthetic construct
  REGION 1..19: note = GFR-binding peptide
  VARIANT 14..15: note = Xaa is C or S
FFLISLSSLRTPVXXTPPT

SEQ ID NO: 3952 - protein, 17 aa, synthetic construct
  REGION 1..17: note = GFR-binding peptide
  VARIANT 14..15: note = Xaa is C or S
FFLISLSSLDQPVXXPS

SEQ ID NO: 3953 - protein, 19 aa, synthetic construct
  REGION 1..19: note = GFR-binding peptide
  VARIANT 14: note = Xaa is C or S
FFLMSLSSEETPVXELGED

SEQ ID NO: 3954 - protein, 13 aa, synthetic construct
  REGION 1..13: note = GFR-binding peptide
FFLMSLSSEETPV

SEQ ID NO: 3955 - protein, 11 aa, synthetic construct
  REGION 1..11: note = GFR-binding peptide
FFLVSLSSHHV

SEQ ID NO: 3956 - protein, 17 aa, synthetic construct
  REGION 1..17: note = GFR-binding peptide
  VARIANT 14..15: note = Xaa is C or S
FFLVSLSSLKTPAXXPK

SEQ ID NO: 3957 - protein, 18 aa, synthetic construct
  REGION 1..18: note = GFR-binding peptide
  VARIANT 14..15: note = Xaa is C or S
FFLVSLSSLKTPAXXAKP

SEQ ID NO: 3958 - protein, 19 aa, synthetic construct
  REGION 1..19: note = GFR-binding peptide
  VARIANT 14..15: note = Xaa is C or S
FFLISLSSLAQPVXXPAAS

SEQ ID NO: 3959 - protein, 18 aa, synthetic construct
  REGION 1..18: note = GFR-binding peptide
  VARIANT 16: note = Xaa is C or S
FFLVSLSSHHVRSPQXKV

SEQ ID NO: 3960 - protein, 19 aa, synthetic construct
  REGION 1..19: note = GFR-binding peptide
  VARIANT 14..15: note = Xaa is C or S
FFLVSLSSLKTPVXXAKGV

SEQ ID NO: 3961 - protein, 12 aa, synthetic construct
  REGION 1..12: note = GFR-binding peptide
FFLISLSSLRAP

SEQ ID NO: 3962 - protein, 10 aa, synthetic construct
  REGION 1..10: note = GFR-binding peptide
FFLMSLSSEE

SEQ ID NO: 3963 - protein, 16 aa, synthetic construct
  REGION 1..16: note = GFR-binding peptide
  VARIANT 14..15: note = Xaa is C or S
FFLISLSSLAQPVXXP

SEQ ID NO: 3964 - protein, 20 aa, synthetic construct
  REGION 1..20: note = GFR-binding peptide
  VARIANT 14..15: note = Xaa is C or S
FFLISLSSLDQPVXXPSASA

SEQ ID NO: 3965 - protein, 16 aa, synthetic construct
  REGION 1..16: note = GFR-binding peptide
  VARIANT 14..15: note = Xaa is C or S
FFLVSLSSLQTPAXXP

SEQ ID NO: 3966 - protein, 19 aa, synthetic construct
  REGION 1..19: note = GFR-binding peptide
  VARIANT 14..15: note = Xaa is C or S
FFLISLSSLKTPVXXAKSA

SEQ ID NO: 3967 - protein, 15 aa, synthetic construct
  REGION 1..15: note = GFR-binding peptide
  VARIANT 14..15: note = Xaa is C or S
FFLISLSSLDQPVXX

SEQ ID NO: 3968 - protein, 15 aa, synthetic construct
  REGION 1..15: note = GFR-binding peptide
  VARIANT 14: note = Xaa is C or S
FFLMSLSSEETPVXE

SEQ ID NO: 3969 - protein, 12 aa, synthetic construct
  REGION 1..12: note = GFR-binding peptide
FFLISLSSMKEP

SEQ ID NO: 3970 - protein, 10 aa, synthetic construct
  REGION 1..10: note = GFR-binding peptide
FFLISLSSLD

SEQ ID NO: 3971 - protein, 14 aa, synthetic construct
  REGION 1..14: note = GFR-binding peptide
  VARIANT 14: note = Xaa is C or S
FFLISLSSLRAPVX

SEQ ID NO: 3972 - protein, 17 aa, synthetic construct
  REGION 1..17: note = GFR-binding peptide
  VARIANT 14..15: note = Xaa is C or S
FFLVSLSSLKTPVXXAK

SEQ ID NO: 3973 - protein, 20 aa, synthetic construct
  REGION 1..20: note = GFR-binding peptide
  VARIANT 14..15: note = Xaa is C or S
FFLVSLSSLKTPAXXAKPVA

SEQ ID NO: 3974 - protein, 15 aa, synthetic construct
  REGION 1..15: note = GFR-binding peptide
  VARIANT 14: note = Xaa is C or S
FFLVSLSSLKTPAXT

SEQ ID NO: 3975 - protein, 13 aa, synthetic construct
  REGION 1..13: note = GFR-binding peptide
FFLISLSSLDQPV

SEQ ID NO: 3976 - protein, 19 aa, synthetic construct
  REGION 1..19: note = GFR-binding peptide
  VARIANT 14..15: note = Xaa is C or S
FFLMSLSSMKTPTXXPGAS

SEQ ID NO: 3977 - protein, 20 aa, synthetic construct
  REGION 1..20: note = GFR-binding peptide
  VARIANT 14..15: note = Xaa is C or S
FFLVSLSSLKTPAXXPKPVH

SEQ ID NO: 3978 - protein, 13 aa, synthetic construct
  REGION 1..13: note = GFR-binding peptide
FFLISLSSLRAPV

SEQ ID NO: 3979 - protein, 12 aa, synthetic construct
  REGION 1..12: note = GFR-binding peptide
FFLVSLSSLKTP

SEQ ID NO: 3980 - protein, 15 aa, synthetic construct
  REGION 1..15: note = GFR-binding peptide
  VARIANT 14..15: note = Xaa is C or S
FFLISLSSLRTPVXX

SEQ ID NO: 3981 - protein, 13 aa, synthetic construct
  REGION 1..13: note = GFR-binding peptide
FFLMSLSSLETPV

SEQ ID NO: 3982 - protein, 13 aa, synthetic construct
  REGION 1..13: note = GFR-binding peptide
FFLVSLSSHHVRS

SEQ ID NO: 3983 - protein, 14 aa, synthetic construct
  REGION 1..14: note = GFR-binding peptide
  VARIANT 14: note = Xaa is C or S
FFLISLSSLDQPVX

SEQ ID NO: 3984 - protein, 16 aa, synthetic construct
  REGION 1..16: note = GFR-binding peptide
  VARIANT 14..15: note = Xaa is C or S
FFLISLSSLKTPVXXA

SEQ ID NO: 3985 - protein, 9 aa, synthetic construct
  REGION 1..9: note = GFR-binding peptide
FFLVSLSSH

SEQ ID NO: 3986 - protein, 12 aa, synthetic construct
  REGION 1..12: note = GFR-binding peptide
FFLISLSSLRTP

SEQ ID NO: 3987 - protein, 18 aa, synthetic construct
  REGION 1..18: note = GFR-binding peptide
  VARIANT 14..15: note = Xaa is C or S
FFLVSLSSLKTPAXXPKP

SEQ ID NO: 3988 - protein, 17 aa, synthetic construct
  REGION 1..17: note = GFR-binding peptide
  VARIANT 14..15: note = Xaa is C or S
FFLISLSSLAQPVXXPA

SEQ ID NO: 3989 - protein, 16 aa, synthetic construct
  REGION 1..16: note = GFR-binding peptide
  VARIANT 14..15: note = Xaa is C or S
FFLISLSSMKEPVXXP

SEQ ID NO: 3990 - protein, 15 aa, synthetic construct
  REGION 1..15: note = GFR-binding peptide
  VARIANT 14..15: note = Xaa is C or S
FFLVSLSSLKTPVXX

SEQ ID NO: 3991 - protein, 16 aa, synthetic construct
  REGION 1..16: note = GFR-binding peptide
  VARIANT 14: note = Xaa is C or S
FFLVSLSSLKTPAXTP

SEQ ID NO: 3992 - protein, 15 aa, synthetic construct
  REGION 1..15: note = GFR-binding peptide
  VARIANT 14..15: note = Xaa is C or S
FFLISLSSMKEPVXX

SEQ ID NO: 3993 - protein, 14 aa, synthetic construct
  REGION 1..14: note = GFR-binding peptide
  VARIANT 14: note = Xaa is C or S
FFLISLSSLDQSVX

SEQ ID NO: 3994 - protein, 10 aa, synthetic construct
  REGION 1..10: note = GFR-binding peptide
FFLMSLSSMK

SEQ ID NO: 3995 - protein, 9 aa, synthetic construct
  REGION 1..9: note = GFR-binding peptide
FFLVSLSSL

SEQ ID NO: 3996 - protein, 13 aa, synthetic construct
  REGION 1..13: note = GFR-binding peptide
FFLISLSSLDQSV

SEQ ID NO: 3997 - protein, 11 aa, synthetic construct
  REGION 1..11: note = GFR-binding peptide
FFLMSLSSTKV

SEQ ID NO: 3998 - protein, 15 aa, synthetic construct
  REGION 1..15: note = GFR-binding peptide
  VARIANT 14..15: note = Xaa is C or S
FFLISLSSLKTPVXX

SEQ ID NO: 3999 - protein, 11 aa, synthetic construct
  REGION 1..11: note = GFR-binding peptide
FFLISLSSLAQ

SEQ ID NO: 4000 - protein, 19 aa, synthetic construct
  REGION 1..19: note = GFR-binding peptide
  VARIANT 14..15: note = Xaa is C or S
FFLISLSSLRAPVXXSAPA

SEQ ID NO: 4001 - protein, 15 aa, synthetic construct
  REGION 1..15: note = GFR-binding peptide
  VARIANT 14..15: note = Xaa is C or S
FFLVSLSSLKTPAXX

SEQ ID NO: 4002 - protein, 11 aa, synthetic construct
  REGION 1..11: note = GFR-binding peptide
FFLISLSSMKE

SEQ ID NO: 4003 - protein, 16 aa, synthetic construct
  REGION 1..16: note = GFR-binding peptide
  VARIANT 14..15: note = Xaa is C or S
FFLVSLSSLKTPAXXA

SEQ ID NO: 4004 - protein, 17 aa, synthetic construct
  REGION 1..17: note = GFR-binding peptide
  VARIANT 14..15: note = Xaa is C or S
FFLMSLSSLETPVXXAK

SEQ ID NO: 4005 - protein, 16 aa, synthetic construct
  REGION 1..16: note = GFR-binding peptide
  VARIANT 14..15: note = Xaa is C or S
FFLISLSSLDQPVXXP

SEQ ID NO: 4006 - protein, 18 aa, synthetic construct
  REGION 1..18: note = GFR-binding peptide
  VARIANT 14..15: note = Xaa is C or S
FFLISLSSLDQPVXXPSA

SEQ ID NO: 4007 - protein, 17 aa, synthetic construct
  REGION 1..17: note = GFR-binding peptide
  VARIANT 14..15: note = Xaa is C or S
FFLISLSSLDQSVXXPS

SEQ ID NO: 4008 - protein, 9 aa, synthetic construct
  REGION 1..9: note = GFR-binding peptide
FFLISLSSL

SEQ ID NO: 4009 - protein, 20 aa, synthetic construct
  REGION 1..20: note = GFR-binding peptide
  VARIANT 14..15: note = Xaa is C or S
FFLVSLSSLKTPVXXAKGVK

SEQ ID NO: 4010 - protein, 19 aa, synthetic construct
  REGION 1..19: note = GFR-binding peptide
  VARIANT 14..15: note = Xaa is C or S
FFLMSLSSTKVPAXXTSPV

SEQ ID NO: 4011 - protein, 17 aa, synthetic construct
  REGION 1..17: note = GFR-binding peptide
  VARIANT 14..15: note = Xaa is C or S
FFLMSLSSTKVPAXXTS

SEQ ID NO: 4012 - protein, 15 aa, synthetic construct
  REGION 1..15: note = GFR-binding peptide
  VARIANT 14..15: note = Xaa is C or S
FFLISLSSLAQPVXX

SEQ ID NO: 4013 - protein, 20 aa, synthetic construct
  REGION 1..20: note = GFR-binding peptide
  VARIANT 14..15: note = Xaa is C or S
FFLISLSSLDQSVXXPSASA

SEQ ID NO: 4014 - protein, 18 aa, synthetic construct
  REGION 1..18: note = GFR-binding peptide
  VARIANT 14..15: note = Xaa is C or S
FFLVSLSSLKTPVXXAKG

SEQ ID NO: 4015 - protein, 18 aa, synthetic construct
  REGION 1..18: note = GFR-binding peptide
  VARIANT 14..15: note = Xaa is C or S
FFLVSLSSLQTPAXXPKP

SEQ ID NO: 4016 - protein, 15 aa, synthetic construct
  REGION 1..15: note = GFR-binding peptide
  VARIANT 14..15: note = Xaa is C or S
FFLVSLSSLQTPAXX

SEQ ID NO: 4017 - protein, 12 aa, synthetic construct
  REGION 1..12: note = GFR-binding peptide
FFLVSLSSLQTP

SEQ ID NO: 4018 - protein, 11 aa, synthetic construct
  REGION 1..11: note = GFR-binding peptide
FFLISLSSLKT

SEQ ID NO: 4019 - protein, 13 aa, synthetic construct
  REGION 1..13: note = GFR-binding peptide
FFLMSLSSMKTPT

SEQ ID NO: 4020 - protein, 20 aa, synthetic construct
  REGION 1..20: note = GFR-binding peptide
  VARIANT 14..15: note = Xaa is C or S
FFLMSLSSLETPVXXAKPIK

SEQ ID NO: 4021 - protein, 19 aa, synthetic construct
  REGION 1..19: note = GFR-binding peptide
  VARIANT 14: note = Xaa is C or S
FFLVSLSSLKTPAXTPKTV

SEQ ID NO: 4022 - protein, 17 aa, synthetic construct
  REGION 1..17: note = GFR-binding peptide
  VARIANT 14..15: note = Xaa is C or S
FFLMSLSSMKTPTXXPG

SEQ ID NO: 4023 - protein, 20 aa, synthetic construct
  REGION 1..20: note = GFR-binding peptide
  VARIANT 14..15: note = Xaa is C or S
FFLISLSSLAQPVXXPAASA

SEQ ID NO: 4024 - protein, 14 aa, synthetic construct
  REGION 1..14: note = GFR-binding peptide
  VARIANT 14: note = Xaa is C or S
FFLMSLSSEETPVX

SEQ ID NO: 4025 - protein, 16 aa, synthetic construct
  REGION 1..16: note = GFR-binding peptide
  VARIANT 14..15: note = Xaa is C or S
FFLISLSSLRTPVXXT

SEQ ID NO: 4026 - protein, 13 aa, synthetic construct
  REGION 1..13: note = GFR-binding peptide
FFLMSLSSTKVPA

SEQ ID NO: 4027 - protein, 12 aa, synthetic construct
  REGION 1..12: note = GFR-binding peptide
FFLISLSSLAQP

SEQ ID NO: 4028 - protein, 14 aa, synthetic construct
  REGION 1..14: note = GFR-binding peptide
  VARIANT 14: note = Xaa is C or S
FFLVSLSSLKTPVX

SEQ ID NO: 4029 - protein, 12 aa, synthetic construct
  REGION 1..12: note = GFR-binding peptide
FFLISLSSLKTP

SEQ ID NO: 4030 - protein, 16 aa, synthetic construct
  REGION 1..16: note = GFR-binding peptide
  VARIANT 14..15: note = Xaa is C or S
FFLVSLSSLKTPVXXA

SEQ ID NO: 4031 - protein, 14 aa, synthetic construct
  REGION 1..14: note = GFR-binding peptide
  VARIANT 14: note = Xaa is C or S
FFLISLSSLRTPVX

SEQ ID NO: 4032 - protein, 13 aa, synthetic construct
  REGION 1..13: note = GFR-binding peptide
FFLVSLSSLKTPV

SEQ ID NO: 4033 - protein, 16 aa, synthetic construct
  REGION 1..16: note = GFR-binding peptide
  VARIANT 14..15: note = Xaa is C or S
FFLVSLSSLKTPAXXP

SEQ ID NO: 4034 - protein, 12 aa, synthetic construct
  REGION 1..12: note = GFR-binding peptide
FFLMSLSSTKVP

SEQ ID NO: 4035 - protein, 12 aa, synthetic construct
  REGION 1..12: note = GFR-binding peptide
FFLISLSSLDQP

SEQ ID NO: 4036 - protein, 11 aa, synthetic construct
  REGION 1..11: note = GFR-binding peptide
FFLMSLSSEET

SEQ ID NO: 4037 - protein, 13 aa, synthetic construct
  REGION 1..13: note = GFR-binding peptide
FFLISLSSMKEPV

SEQ ID NO: 4038 - protein, 20 aa, synthetic construct
  REGION 1..20: note = GFR-binding peptide
  VARIANT 16: note = Xaa is C or S
FFLVSLSSHHVRSPQXKVSS

SEQ ID NO: 4039 - protein, 12 aa, synthetic construct
  REGION 1..12: note = GFR-binding peptide
FFLVSLSSHHVR

SEQ ID NO: 4040 - protein, 10 aa, synthetic construct
  REGION 1..10: note = GFR-binding peptide
FFLMSLSSTK

SEQ ID NO: 4041 - protein, 18 aa, synthetic construct
  REGION 1..18: note = GFR-binding peptide
  VARIANT 14..15: note = Xaa is C or S
FFLMSLSSTKVPAXXTSP

SEQ ID NO: 4042 - protein, 15 aa, synthetic construct
  REGION 1..15: note = GFR-binding peptide
  VARIANT 14..15: note = Xaa is C or S
FFLMSLSSMKTPTXX

SEQ ID NO: 4043 - protein, 16 aa, synthetic construct
  REGION 1..16: note = GFR-binding peptide
  VARIANT 14..15: note = Xaa is C or S
FFLISLSSLDQSVXXP

SEQ ID NO: 4044 - protein, 10 aa, synthetic construct
  REGION 1..10: note = GFR-binding peptide
FFLVSLSSHH

SEQ ID NO: 4045 - protein, 17 aa, synthetic construct
  REGION 1..17: note = GFR-binding peptide
  VARIANT 14..15: note = Xaa is C or S
FFLISLSSMKEPVXXPE

SEQ ID NO: 4046 - protein, 15 aa, synthetic construct
  REGION 1..15: note = GFR-binding peptide
  VARIANT 14..15: note = Xaa is C or S
FFLMSLSSTKVPAXX

SEQ ID NO: 4047 - protein, 11 aa, synthetic construct
  REGION 1..11: note = GFR-binding peptide
FFLVSLSSLQT

SEQ ID NO: 4048 - protein, 9 aa, synthetic construct
  REGION 1..9: note = GFR-binding peptide
FFLISLSSM

SEQ ID NO: 4049 - protein, 14 aa, synthetic construct
  REGION 1..14: note = GFR-binding peptide
  VARIANT 14: note = Xaa is C or S
FFLVSLSSLQTPAX

SEQ ID NO: 4050 - protein, 11 aa, synthetic construct
  REGION 1..11: note = GFR-binding peptide
FFLISLSSLDQ

SEQ ID NO: 4051 - protein, 18 aa, synthetic construct
  REGION 1..18: note = GFR-binding peptide
  VARIANT 14..15: note = Xaa is C or S
FFLISLSSLKTPVXXAKS

SEQ ID NO: 4052 - protein, 18 aa, synthetic construct
  REGION 1..18: note = GFR-binding peptide
  VARIANT 14: note = Xaa is C or S
FFLVSLSSLKTPAXTPKT

SEQ ID NO: 4053 - protein, 14 aa, synthetic construct
  REGION 1..14: note = GFR-binding peptide
  VARIANT 14: note = Xaa is C or S
FFLISLSSLKTPVX

SEQ ID NO: 4054 - protein, 16 aa, synthetic construct
  REGION 1..16: note = GFR-binding peptide
  VARIANT 14..15: note = Xaa is C or S
FFLMSLSSTKVPAXXT

SEQ ID NO: 4055 - protein, 20 aa, synthetic construct
  REGION 1..20: note = GFR-binding peptide
  VARIANT 14..15: note = Xaa is C or S
FFLVSLSSLQTPAXXPKPVT

SEQ ID NO: 4056 - protein, 18 aa, synthetic construct
  REGION 1..18: note = GFR-binding peptide
  VARIANT 14..15: note = Xaa is C or S
FFLMSLSSLETPVXXAKP

SEQ ID NO: 4057 - protein, 18 aa, synthetic construct
  REGION 1..18: note = GFR-binding peptide
  VARIANT 14..15: note = Xaa is C or S
FFLISLSSLAQPVXXPAA

SEQ ID NO: 4058 - protein, 19 aa, synthetic construct
  REGION 1..19: note = GFR-binding peptide
  VARIANT 14..15: note = Xaa is C or S
FFLVSLSSLQTPAXXPKPV

SEQ ID NO: 4059 - protein, 18 aa, synthetic construct
  REGION 1..18: note = GFR-binding peptide
  VARIANT 14..15: note = Xaa is C or S
FFLISLSSLRTPVXXTPP

SEQ ID NO: 4060 - protein, 12 aa, synthetic construct
  REGION 1..12: note = GFR-binding peptide
FFLMSLSSLETP

SEQ ID NO: 4061 - protein, 18 aa, synthetic construct
  REGION 1..18: note = GFR-binding peptide
  VARIANT 14..15: note = Xaa is C or S
FFLISLSSLDQSVXXPSA

SEQ ID NO: 4062 - protein, 17 aa, synthetic construct
  REGION 1..17: note = GFR-binding peptide
  VARIANT 14..15: note = Xaa is C or S
FFLVSLSSLQTPAXXPK

SEQ ID NO: 4063 - protein, 14 aa, synthetic construct
  REGION 1..14: note = GFR-binding peptide
  VARIANT 14: note = Xaa is C or S
FFLMSLSSLETPVX

SEQ ID NO: 4064 - protein, 11 aa, synthetic construct
  REGION 1..11: note = GFR-binding peptide
QDLSNITIQIM

SEQ ID NO: 4065 - protein, 11 aa, synthetic construct
  REGION 1..11: note = GFR-binding peptide
TEERPVQMRKI

SEQ ID NO: 4066 - protein, 15 aa, synthetic construct
  REGION 1..15: note = GFR-binding peptide
  VARIANT 1..2: note = Xaa is C or S
XXVSQDLRSVKIAKV

SEQ ID NO: 4067 - protein, 12 aa, synthetic construct
  REGION 1..12: note = GFR-binding peptide
RVHHSNITVQIM

SEQ ID NO: 4068 - protein, 11 aa, synthetic construct
  REGION 1..11: note = GFR-binding peptide
TQLEPLTVLYY

SEQ ID NO: 4069 - protein, 13 aa, synthetic construct
  REGION 1..13: note = GFR-binding peptide
VPQDLEPLPIVYY

SEQ ID NO: 4070 - protein, 10 aa, synthetic construct
  REGION 1..10: note = GFR-binding peptide
KLSNITVQIM

SEQ ID NO: 4071 - protein, 15 aa, synthetic construct
  REGION 1..15: note = GFR-binding peptide
  VARIANT 2: note = Xaa is C or S
TXAPTKLRSVKVAKV

SEQ ID NO: 4072 - protein, 19 aa, synthetic construct
  REGION 1..19: note = GFR-binding peptide
  VARIANT 5..6: note = Xaa is C or S
VPKPXXAPTKLEPLTVLYY

SEQ ID NO: 4073 - protein, 12 aa, synthetic construct
  REGION 1..12: note = GFR-binding peptide
PTELRSVKMAKV

SEQ ID NO: 4074 - protein, 9 aa, synthetic construct
  REGION 1..9: note = GFR-binding peptide
LRSVKMAKV

SEQ ID NO: 4075 - protein, 17 aa, synthetic construct
  REGION 1..17: note = GFR-binding peptide
  VARIANT 3..4: note = Xaa is C or S
KPXXAPTQLEPLTVLYY

SEQ ID NO: 4076 - protein, 19 aa, synthetic construct
  REGION 1..19: note = GFR-binding peptide
  VARIANT 6: note = Xaa is C or S
VTKPTXAPTKLRPVQVRKI

SEQ ID NO: 4077 - protein, 18 aa, synthetic construct
  REGION 1..18: note = GFR-binding peptide
  VARIANT 5: note = Xaa is C or S
TKPTXAPTKLEPLTVLYY

SEQ ID NO: 4078 - protein, 16 aa, synthetic construct
  REGION 1..16: note = GFR-binding peptide
  VARIANT 2..3: note = Xaa is C or S
PXXAPTKLEPLPVVYY

SEQ ID NO: 4079 - protein, 16 aa, synthetic construct
  REGION 1..16: note = GFR-binding peptide
  VARIANT 3: note = Xaa is C or S
PTXAPTKLEPLTVLYY

SEQ ID NO: 4080 - protein, 20 aa, synthetic construct
  REGION 1..20: note = GFR-binding peptide
  VARIANT 6..7: note = Xaa is C or S
ASAAPXXVPQALSNITIQIM

SEQ ID NO: 4081 - protein, 19 aa, synthetic construct
  REGION 1..19: note = GFR-binding peptide
  VARIANT 5..6: note = Xaa is C or S
VPKPXXAPTQLRSVKVAKV

SEQ ID NO: 4082 - protein, 11 aa, synthetic construct
  REGION 1..11: note = GFR-binding peptide
TELSNITMQIM

SEQ ID NO: 4083 - protein, 13 aa, synthetic construct
  REGION 1..13: note = GFR-binding peptide
TQVQLSNITVQIM

SEQ ID NO: 4084 - protein, 19 aa, synthetic construct
  REGION 1..19: note = GFR-binding peptide
  VARIANT 6: note = Xaa is C or S
DEGLEXVPTEERSVKMAKV

SEQ ID NO: 4085 - protein, 16 aa, synthetic construct
  REGION 1..16: note = GFR-binding peptide
  VARIANT 2..3: note = Xaa is C or S
PXXVSQDLRSVKIAKV

SEQ ID NO: 4086 - protein, 9 aa, synthetic construct
  REGION 1..9: note = GFR-binding peptide
LEPLPVVYY

SEQ ID NO: 4087 - protein, 9 aa, synthetic construct
  REGION 1..9: note = GFR-binding peptide
LRPVQIRKI

SEQ ID NO: 4088 - protein, 13 aa, synthetic construct
  REGION 1..13: note = GFR-binding peptide
VPTEERSVKMAKV

SEQ ID NO: 4089 - protein, 10 aa, synthetic construct
  REGION 1..10: note = GFR-binding peptide
DLEPLPIVYY

SEQ ID NO: 4090 - protein, 13 aa, synthetic construct
  REGION 1..13: note = GFR-binding peptide
VPTELEPLTMLYY

SEQ ID NO: 4091 - protein, 19 aa, synthetic construct
  REGION 1..19: note = GFR-binding peptide
  VARIANT 5..6: note = Xaa is C or S
VPKPXXAPTKLEPLPVVYY

SEQ ID NO: 4092 - protein, 15 aa, synthetic construct
  REGION 1..15: note = GFR-binding peptide
  VARIANT 1..2: note = Xaa is C or S
XXVPTELEPLTMLYY

SEQ ID NO: 4093 - protein, 14 aa, synthetic construct
  REGION 1..14: note = GFR-binding peptide
PSRVHHSNITVQIM

SEQ ID NO: 4094 - protein, 20 aa, synthetic construct
  REGION 1..20: note = GFR-binding peptide
  VARIANT 7: note = Xaa is C or S
HVTKPTXAPTKLRSVKVAKV

SEQ ID NO: 4095 - protein, 16 aa, synthetic construct
  REGION 1..16: note = GFR-binding peptide
  VARIANT 2..3: note = Xaa is C or S
PXXVPQDLEPLPIVYY

SEQ ID NO: 4096 - protein, 11 aa, synthetic construct
  REGION 1..11: note = GFR-binding peptide
TQLEPLPVVYY

SEQ ID NO: 4097 - protein, 12 aa, synthetic construct
  REGION 1..12: note = GFR-binding peptide
PTKLRSVKVAKV

SEQ ID NO: 4098 - protein, 13 aa, synthetic construct
  REGION 1..13: note = GFR-binding peptide
APTKLRSVKVAKV

SEQ ID NO: 4099 - protein, 11 aa, synthetic construct
  REGION 1..11: note = GFR-binding peptide
VQLEPLTVLYY

SEQ ID NO: 4100 - protein, 17 aa, synthetic construct
  REGION 1..17: note = GFR-binding peptide
  VARIANT 3..4: note = Xaa is C or S
KPXXAPTQLEPLPVVYY

SEQ ID NO: 4101 - protein, 17 aa, synthetic construct
  REGION 1..17: note = GFR-binding peptide
  VARIANT 3..4: note = Xaa is C or S
APXXVPQALRPVQIRKI

SEQ ID NO: 4102 - protein, 14 aa, synthetic construct
  REGION 1..14: note = GFR-binding peptide
  VARIANT 1: note = Xaa is C or S
XAPTQLEPLPVVYY

SEQ ID NO: 4103 - protein, 17 aa, synthetic construct
  REGION 1..17: note = GFR-binding peptide
  VARIANT 4: note = Xaa is C or S
KPTXAPTKLEPLPVVYY

SEQ ID NO: 4104 - protein, 15 aa, synthetic construct
  REGION 1..15: note = GFR-binding peptide
RPTQVQLEPLTVLYY

SEQ ID NO: 4105 - protein, 18 aa, synthetic construct
  REGION 1..18: note = GFR-binding peptide
  VARIANT 4..5: note = Xaa is C or S
PKPXXAPTQLSNITVQIM

SEQ ID NO: 4106 - protein, 14 aa, synthetic construct
  REGION 1..14: note = GFR-binding peptide
  VARIANT 1: note = Xaa is C or S
XVPTELSNITMQIM

SEQ ID NO: 4107 - protein, 15 aa, synthetic construct
  REGION 1..15: note = GFR-binding peptide
  VARIANT 2: note = Xaa is C or S
EXVPTEERSVKMAKV

SEQ ID NO: 4108 - protein, 13 aa, synthetic construct
  REGION 1..13: note = GFR-binding peptide
VSQDLRSVKIAKV

SEQ ID NO: 4109 - protein, 14 aa, synthetic construct
  REGION 1..14: note = GFR-binding peptide
  VARIANT 1: note = Xaa is C or S
XVPTEERPVQMRKI

SEQ ID NO: 4110 - protein, 16 aa, synthetic construct
  REGION 1..16: note = GFR-binding peptide
  VARIANT 3: note = Xaa is C or S
PTXAPTKLEPLPVVYY

SEQ ID NO: 4111 - protein, 17 aa, synthetic construct
  REGION 1..17: note = GFR-binding peptide
  VARIANT 3..4: note = Xaa is C or S
SPXXVSQDLEPLPIVYY

SEQ ID NO: 4112 - protein, 16 aa, synthetic construct
  REGION 1..16: note = GFR-binding peptide
  VARIANT 2..3: note = Xaa is C or S
PXXAPTKLEPLTVLYY

SEQ ID NO: 4113 - protein, 15 aa, synthetic construct
  REGION 1..15: note = GFR-binding peptide
QPSRVHHSNITVQIM

SEQ ID NO: 4114 - protein, 14 aa, synthetic construct
  REGION 1..14: note = GFR-binding peptide
  VARIANT 1: note = Xaa is C or S
XVPQDLSNITIQIM

SEQ ID NO: 4115 - protein, 20 aa, synthetic construct
  REGION 1..20: note = GFR-binding peptide
  VARIANT 6..7: note = Xaa is C or S
KIPKAXXVPTELEPLTMLYY

SEQ ID NO: 4116 - protein, 14 aa, synthetic construct
  REGION 1..14: note = GFR-binding peptide
  VARIANT 1: note = Xaa is C or S
XVPTEEEPLTMLYY

SEQ ID NO: 4117 - protein, 18 aa, synthetic construct
  REGION 1..18: note = GFR-binding peptide
  VARIANT 5: note = Xaa is C or S
TKPTXAPTKLRPVQVRKI

SEQ ID NO: 4118 - protein, 14 aa, synthetic construct
  REGION 1..14: note = GFR-binding peptide
  VARIANT 1: note = Xaa is C or S
XVPTELRPVQMRKI

SEQ ID NO: 4119 - protein, 15 aa, synthetic construct
  REGION 1..15: note = GFR-binding peptide
  VARIANT 1..2: note = Xaa is C or S
XXAPTKLEPLPVVYY

SEQ ID NO: 4120 - protein, 13 aa, synthetic construct
  REGION 1..13: note = GFR-binding peptide
APTKLEPLPVVYY

SEQ ID NO: 4121 - protein, 17 aa, synthetic construct
  REGION 1..17: note = GFR-binding peptide
  VARIANT 3..4: note = Xaa is C or S
KPXXAPTQLRPVQVRKI

SEQ ID NO: 4122 - protein, 20 aa, synthetic construct
  REGION 1..20: note = GFR-binding peptide
  VARIANT 6..7: note = Xaa is C or S
SIPKAXXVPTELEPLPMVYY

SEQ ID NO: 4123 - protein, 17 aa, synthetic construct
  REGION 1..17: note = GFR-binding peptide
  VARIANT 3..4: note = Xaa is C or S
KPXXAPTKLRPVQVRKI

SEQ ID NO: 4124 - protein, 17 aa, synthetic construct
  REGION 1..17: note = GFR-binding peptide
  VARIANT 2: note = Xaa is C or S
KXQPSRVHHEPLPVVYY

SEQ ID NO: 4125 - protein, 20 aa, synthetic construct
  REGION 1..20: note = GFR-binding peptide
  VARIANT 6..7: note = Xaa is C or S
ASASPXXVPQDLRPVQIRKI

SEQ ID NO: 4126 - protein, 11 aa, synthetic construct
  REGION 1..11: note = GFR-binding peptide
TQLRPVQVRKI

SEQ ID NO: 4127 - protein, 14 aa, synthetic construct
  REGION 1..14: note = GFR-binding peptide
PTQVQLSNITVQIM

SEQ ID NO: 4128 - protein, 17 aa, synthetic construct
  REGION 1..17: note = GFR-binding peptide
  VARIANT 3..4: note = Xaa is C or S
APXXVPQALSNITIQIM

SEQ ID NO: 4129 - protein, 14 aa, synthetic construct
  REGION 1..14: note = GFR-binding peptide
  VARIANT 1: note = Xaa is C or S
XAPTKLEPLTVLYY

SEQ ID NO: 4130 - protein, 16 aa, synthetic construct
  REGION 1..16: note = GFR-binding peptide
  VARIANT 2..3: note = Xaa is C or S
PXXVPQALRSVKIAKV

SEQ ID NO: 4131 - protein, 18 aa, synthetic construct
  REGION 1..18: note = GFR-binding peptide
  VARIANT 4..5: note = Xaa is C or S
PKAXXVPTELSNITMQIM

SEQ ID NO: 4132 - protein, 17 aa, synthetic construct
  REGION 1..17: note = GFR-binding peptide
  VARIANT 4: note = Xaa is C or S
KPTXAPTKLEPLTVLYY

SEQ ID NO: 4133 - protein, 17 aa, synthetic construct
  REGION 1..17: note = GFR-binding peptide
  VARIANT 3..4: note = Xaa is C or S
KAXXVPTELSNITMQIM

SEQ ID NO: 4134 - protein, 12 aa, synthetic construct
  REGION 1..12: note = GFR-binding peptide
PTQLSNITVQIM

SEQ ID NO: 4135 - protein, 19 aa, synthetic construct
  REGION 1..19: note = GFR-binding peptide
  VARIANT 6: note = Xaa is C or S
VTKPTXAPTKLEPLTVLYY

SEQ ID NO: 4136 - protein, 17 aa, synthetic construct
  REGION 1..17: note = GFR-binding peptide
  VARIANT 3..4: note = Xaa is C or S
SPXXVSQDLRSVKIAKV

SEQ ID NO: 4137 - protein, 15 aa, synthetic construct
  REGION 1..15: note = GFR-binding peptide
  VARIANT 2: note = Xaa is C or S
TXAPTKLEPLPVVYY

SEQ ID NO: 4138 - protein, 20 aa, synthetic construct
  REGION 1..20: note = GFR-binding peptide
  VARIANT 6..7: note = Xaa is C or S
ASAAPXXVPQALRPVQIRKI

SEQ ID NO: 4139 - protein, 13 aa, synthetic construct
  REGION 1..13: note = GFR-binding peptide
VPTELRPVQMRKI

SEQ ID NO: 4140 - protein, 16 aa, synthetic construct
  REGION 1..16: note = GFR-binding peptide
  VARIANT 2..3: note = Xaa is C or S
AXXVPTELEPLTMLYY

SEQ ID NO: 4141 - protein, 15 aa, synthetic construct
  REGION 1..15: note = GFR-binding peptide
  VARIANT 1..2: note = Xaa is C or S
XXAPTKLRSVKVAKV

SEQ ID NO: 4142 - protein, 14 aa, synthetic construct
  REGION 1..14: note = GFR-binding peptide
  VARIANT 1: note = Xaa is C or S
XAPTQLEPLTVLYY

SEQ ID NO: 4143 - protein, 15 aa, synthetic construct
  REGION 1..15: note = GFR-binding peptide
  VARIANT 1..2: note = Xaa is C or S
XXVPQDLEPLPIVYY

SEQ ID NO: 4144 - protein, 10 aa, synthetic construct
  REGION 1..10: note = GFR-binding peptide
ELSNITMQIM

SEQ ID NO: 4145 - protein, 19 aa, synthetic construct
  REGION 1..19: note = GFR-binding peptide
  VARIANT 5..6: note = Xaa is C or S
SASPXXVSQDLRSVKIAKV

SEQ ID NO: 4146 - protein, 20 aa, synthetic construct
  REGION 1..20: note = GFR-binding peptide
  VARIANT 7: note = Xaa is C or S
HVTKPTXAPTKLEPLPVVYY

SEQ ID NO: 4147 - protein, 14 aa, synthetic construct
  REGION 1..14: note = GFR-binding peptide
  VARIANT 1: note = Xaa is C or S
XVPTEEEPLPMVYY

SEQ ID NO: 4148 - protein, 19 aa, synthetic construct
  REGION 1..19: note = GFR-binding peptide
  VARIANT 5..6: note = Xaa is C or S
IPKAXXVPTELRSVKMAKV

SEQ ID NO: 4149 - protein, 19 aa, synthetic construct
  REGION 1..19: note = GFR-binding peptide
  VARIANT 5..6: note = Xaa is C or S
IPKAXXVPTELEPLTMLYY

SEQ ID NO: 4150 - protein, 17 aa, synthetic construct
  REGION 1..17: note = GFR-binding peptide
  VARIANT 3..4: note = Xaa is C or S
KAXXVPTELEPLTMLYY

SEQ ID NO: 4151 - protein, 20 aa, synthetic construct
  REGION 1..20: note = GFR-binding peptide
  VARIANT 7: note = Xaa is C or S
NDEGLEXVPTEEEPLTMLYY

SEQ ID NO: 4152 - protein, 14 aa, synthetic construct
  REGION 1..14: note = GFR-binding peptide
  VARIANT 1: note = Xaa is C or S
XVPQALRSVKIAKV

SEQ ID NO: 4153 - protein, 15 aa, synthetic construct
  REGION 1..15: note = GFR-binding peptide
  VARIANT 1..2: note = Xaa is C or S
XXVPTELRPVQMRKI

SEQ ID NO: 4154 - protein, 9 aa, synthetic construct
  REGION 1..9: note = GFR-binding peptide
ERSVKMAKV

SEQ ID NO: 4155 - protein, 18 aa, synthetic construct
  REGION 1..18: note = GFR-binding peptide
  VARIANT 3: note = Xaa is C or S
VKXQPSRVHHRPVQVRKI

SEQ ID NO: 4156 - protein, 17 aa, synthetic construct
  REGION 1..17: note = GFR-binding peptide
  VARIANT 3..4: note = Xaa is C or S
APXXVPQALEPLTILYY

SEQ ID NO: 4157 - protein, 10 aa, synthetic construct
  REGION 1..10: note = GFR-binding peptide
QLEPLTVLYY

SEQ ID NO: 4158 - protein, 17 aa, synthetic construct
  REGION 1..17: note = GFR-binding peptide
  VARIANT 2: note = Xaa is C or S
KXQPSRVHHRPVQVRKI

SEQ ID NO: 4159 - protein, 14 aa, synthetic construct
  REGION 1..14: note = GFR-binding peptide
  VARIANT 1: note = Xaa is C or S
XVSQDLRPVQIRKI

SEQ ID NO: 4160 - protein, 19 aa, synthetic construct
  REGION 1..19: note = GFR-binding peptide
  VARIANT 5..6: note = Xaa is C or S
SASPXXVPQDLEPLPIVYY

SEQ ID NO: 4161 - protein, 15 aa, synthetic construct
  REGION 1..15: note = GFR-binding peptide
  VARIANT 2: note = Xaa is C or S
EXVPTEEEPLTMLYY

SEQ ID NO: 4162 - protein, 16 aa, synthetic construct
  REGION 1..16: note = GFR-binding peptide
  VARIANT 2..3: note = Xaa is C or S
AXXVPTELRSVKMAKV

SEQ ID NO: 4163 - protein, 17 aa, synthetic construct
  REGION 1..17: note = GFR-binding peptide
  VARIANT 4: note = Xaa is C or S
GLEXVPTEERSVKMAKV

SEQ ID NO: 4164 - protein, 14 aa, synthetic construct
  REGION 1..14: note = GFR-binding peptide
  VARIANT 1: note = Xaa is C or S
XAPTKLSNITVQIM

SEQ ID NO: 4165 - protein, 11 aa, synthetic construct
  REGION 1..11: note = GFR-binding peptide
QALEPLTILYY

SEQ ID NO: 4166 - protein, 13 aa, synthetic construct
  REGION 1..13: note = GFR-binding peptide
APTQLRSVKVAKV

SEQ ID NO: 4167 - protein, 15 aa, synthetic construct
  REGION 1..15: note = GFR-binding peptide
  VARIANT 1..2: note = Xaa is C or S
XXAPTQLRSVKVAKV

SEQ ID NO: 4168 - protein, 16 aa, synthetic construct
  REGION 1..16: note = GFR-binding peptide
  VARIANT 1: note = Xaa is C or S
XQPSRVHHRPVQVRKI

SEQ ID NO: 4169 - protein, 16 aa, synthetic construct
  REGION 1..16: note = GFR-binding peptide
  VARIANT 1: note = Xaa is C or S
XRPTQVQLEPLPVVYY

SEQ ID NO: 4170 - protein, 9 aa, synthetic construct
  REGION 1..9: note = GFR-binding peptide
LEPLPMVYY

SEQ ID NO: 4171 - protein, 14 aa, synthetic construct
  REGION 1..14: note = GFR-binding peptide
  VARIANT 1: note = Xaa is C or S
XVSQDLEPLPIVYY

SEQ ID NO: 4172 - protein, 17 aa, synthetic construct
  REGION 1..17: note = GFR-binding peptide
  VARIANT 3..4: note = Xaa is C or S
SPXXVPQDLSNITIQIM

SEQ ID NO: 4173 - protein, 10 aa, synthetic construct
  REGION 1..10: note = GFR-binding peptide
DLRPVQIRKI

SEQ ID NO: 4174 - protein, 10 aa, synthetic construct
  REGION 1..10: note = GFR-binding peptide
EERPVQMRKI

SEQ ID NO: 4175 - protein, 13 aa, synthetic construct
  REGION 1..13: note = GFR-binding peptide
VPTELEPLPMVYY

SEQ ID NO: 4176 - protein, 15 aa, synthetic construct
  REGION 1..15: note = GFR-binding peptide
  VARIANT 1..2: note = Xaa is C or S
XXVPTELEPLPMVYY

SEQ ID NO: 4177 - protein, 9 aa, synthetic construct
  REGION 1..9: note = GFR-binding peptide
LEPLTVLYY

SEQ ID NO: 4178 - protein, 12 aa, synthetic construct
  REGION 1..12: note = GFR-binding peptide
QVQLEPLTVLYY

SEQ ID NO: 4179 - protein, 11 aa, synthetic construct
  REGION 1..11: note = GFR-binding peptide
TKLSNITVQIM

SEQ ID NO: 4180 - protein, 13 aa, synthetic construct
  REGION 1..13: note = GFR-binding peptide
VPQDLRPVQIRKI

SEQ ID NO: 4181 - protein, 12 aa, synthetic construct
  REGION 1..12: note = GFR-binding peptide
QVQLSNITVQIM

SEQ ID NO: 4182 - protein, 12 aa, synthetic construct
  REGION 1..12: note = GFR-binding peptide
PQDLRSVKIAKV

SEQ ID NO: 4183 - protein, 15 aa, synthetic construct
  REGION 1..15: note = GFR-binding peptide
  VARIANT 1..2: note = Xaa is C or S
XXVPQDLRPVQIRKI

SEQ ID NO: 4184 - protein, 20 aa, synthetic construct
  REGION 1..20: note = GFR-binding peptide
  VARIANT 6..7: note = Xaa is C or S
KIPKAXXVPTELRSVKMAKV

SEQ ID NO: 4185 - protein, 15 aa, synthetic construct
  REGION 1..15: note = GFR-binding peptide
  VARIANT 1..2: note = Xaa is C or S
XXVPTELSNITMQIM

SEQ ID NO: 4186 - protein, 13 aa, synthetic construct
  REGION 1..13: note = GFR-binding peptide
VPTEEEPLTMLYY

SEQ ID NO: 4187 - protein, 14 aa, synthetic construct
  REGION 1..14: note = GFR-binding peptide
  VARIANT 1: note = Xaa is C or S
XVPTEERSVKMAKV

SEQ ID NO: 4188 - protein, 12 aa, synthetic construct
  REGION 1..12: note = GFR-binding peptide
SQDLRSVKIAKV

SEQ ID NO: 4189 - protein, 19 aa, synthetic construct
  REGION 1..19: note = GFR-binding peptide
  VARIANT 6: note = Xaa is C or S
DEGLEXVPTEEEPLTMLYY

SEQ ID NO: 4190 - protein, 16 aa, synthetic construct
  REGION 1..16: note = GFR-binding peptide
  VARIANT 2..3: note = Xaa is C or S
PXXVPQDLRSVKIAKV

SEQ ID NO: 4191 - protein, 13 aa, synthetic construct
  REGION 1..13: note = GFR-binding peptide
VSQDLEPLPIVYY

SEQ ID NO: 4192 - protein, 14 aa, synthetic construct
  REGION 1..14: note = GFR-binding peptide
PTQVQLEPLPVVYY

SEQ ID NO: 4193 - protein, 17 aa, synthetic construct
  REGION 1..17: note = GFR-binding peptide
  VARIANT 3..4: note = Xaa is C or S
KPXXAPTQLRSVKVAKV

SEQ ID NO: 4194 - protein, 15 aa, synthetic construct
  REGION 1..15: note = GFR-binding peptide
  VARIANT 1..2: note = Xaa is C or S
XXVPQDLRSVKIAKV

SEQ ID NO: 4195 - protein, 15 aa, synthetic construct
  REGION 1..15: note = GFR-binding peptide
RPTQVQLRSVKVAKV

SEQ ID NO: 4196 - protein, 19 aa, synthetic construct
  REGION 1..19: note = GFR-binding peptide
  VARIANT 5..6: note = Xaa is C or S
VPKPXXAPTQLEPLTVLYY

SEQ ID NO: 4197 - protein, 14 aa, synthetic construct
  REGION 1..14: note = GFR-binding peptide
  VARIANT 1: note = Xaa is C or S
XVPTELEPLTMLYY

SEQ ID NO: 4198 - protein, 19 aa, synthetic construct
  REGION 1..19: note = GFR-binding peptide
  VARIANT 5..6: note = Xaa is C or S
IPKAXXVPTELRPVQMRKI

SEQ ID NO: 4199 - protein, 18 aa, synthetic construct
  REGION 1..18: note = GFR-binding peptide
  VARIANT 3: note = Xaa is C or S
VKXQPSRVHHEPLPVVYY

SEQ ID NO: 4200 - protein, 15 aa, synthetic construct
  REGION 1..15: note = GFR-binding peptide
QPSRVHHRPVQVRKI

SEQ ID NO: 4201 - protein, 16 aa, synthetic construct
  REGION 1..16: note = GFR-binding peptide
  VARIANT 1: note = Xaa is C or S
XQPSRVHHEPLPVVYY

SEQ ID NO: 4202 - protein, 19 aa, synthetic construct
  REGION 1..19: note = GFR-binding peptide
  VARIANT 5..6: note = Xaa is C or S
SASPXXVSQDLSNITIQIM

SEQ ID NO: 4203 - protein, 17 aa, synthetic construct
  REGION 1..17: note = GFR-binding peptide
  VARIANT 4: note = Xaa is C or S
GLEXVPTEERPVQMRKI

SEQ ID NO: 4204 - protein, 20 aa, synthetic construct
  REGION 1..20: note = GFR-binding peptide
  VARIANT 6..7: note = Xaa is C or S
YVPKPXXAPTKLEPLTVLYY

SEQ ID NO: 4205 - protein, 14 aa, synthetic construct
  REGION 1..14: note = GFR-binding peptide
  VARIANT 1: note = Xaa is C or S
XVPTELEPLPMVYY

SEQ ID NO: 4206 - protein, 12 aa, synthetic construct
  REGION 1..12: note = GFR-binding peptide
RVHHEPLTVLYY

SEQ ID NO: 4207 - protein, 18 aa, synthetic construct
  REGION 1..18: note = GFR-binding peptide
  VARIANT 5: note = Xaa is C or S
TKPTXAPTKLRSVKVAKV

SEQ ID NO: 4208 - protein, 17 aa, synthetic construct
  REGION 1..17: note = GFR-binding peptide
  VARIANT 3..4: note = Xaa is C or S
SPXXVSQDLRPVQIRKI

SEQ ID NO: 4209 - protein, 10 aa, synthetic construct
  REGION 1..10: note = GFR-binding peptide
KLRPVQVRKI

SEQ ID NO: 4210 - protein, 19 aa, synthetic construct
  REGION 1..19: note = GFR-binding peptide
  VARIANT 5..6: note = Xaa is C or S
SASPXXVPQDLRPVQIRKI

SEQ ID NO: 4211 - protein, 17 aa, synthetic construct
  REGION 1..17: note = GFR-binding peptide
  VARIANT 3..4: note = Xaa is C or S
SPXXVPQDLEPLPIVYY

SEQ ID NO: 4212 - protein, 20 aa, synthetic construct
  REGION 1..20: note = GFR-binding peptide
  VARIANT 7: note = Xaa is C or S
NDEGLEXVPTEERSVKMAKV

SEQ ID NO: 4213 - protein, 16 aa, synthetic construct
  REGION 1..16: note = GFR-binding peptide
  VARIANT 3: note = Xaa is C or S
LEXVPTEERPVQMRKI

SEQ ID NO: 4214 - protein, 11 aa, synthetic construct
  REGION 1..11: note = GFR-binding peptide
VHHEPLPVVYY

SEQ ID NO: 4215 - protein, 16 aa, synthetic construct
  REGION 1..16: note = GFR-binding peptide
  VARIANT 3: note = Xaa is C or S
PTXAPTKLRSVKVAKV

SEQ ID NO: 4216 - protein, 18 aa, synthetic construct
  REGION 1..18: note = GFR-binding peptide
  VARIANT 3: note = Xaa is C or S
VQXRPTQVQLRSVKVAKV

SEQ ID NO: 4217 - protein, 11 aa, synthetic construct
  REGION 1..11: note = GFR-binding peptide
QDLRPVQIRKI

SEQ ID NO: 4218 - protein, 12 aa, synthetic construct
  REGION 1..12: note = GFR-binding peptide
RVHHRPVQVRKI

SEQ ID NO: 4219 - protein, 16 aa, synthetic construct
  REGION 1..16: note = GFR-binding peptide
  VARIANT 2..3: note = Xaa is C or S
PXXVSQDLEPLPIVYY

SEQ ID NO: 4220 - protein, 20 aa, synthetic construct
  REGION 1..20: note = GFR-binding peptide
  VARIANT 6..7: note = Xaa is C or S
SIPKAXXVPTELEPLTMLYY

SEQ ID NO: 4221 - protein, 11 aa, synthetic construct
  REGION 1..11: note = GFR-binding peptide
TEEEPLPMVYY

SEQ ID NO: 4222 - protein, 10 aa, synthetic construct
  REGION 1..10: note = GFR-binding peptide
HHEPLTVLYY

SEQ ID NO: 4223 - protein, 11 aa, synthetic construct
  REGION 1..11: note = GFR-binding peptide
TQLSNITVQIM

SEQ ID NO: 4224 - protein, 17 aa, synthetic construct
  REGION 1..17: note = GFR-binding peptide
  VARIANT 4: note = Xaa is C or S
GLEXVPTEEEPLTMLYY

SEQ ID NO: 4225 - protein, 18 aa, synthetic construct
  REGION 1..18: note = GFR-binding peptide
  VARIANT 5: note = Xaa is C or S
EGLEXVPTEEEPLTMLYY

SEQ ID NO: 4226 - protein, 18 aa, synthetic construct
  REGION 1..18: note = GFR-binding peptide
  VARIANT 4..5: note = Xaa is C or S
PKPXXAPTKLRSVKVAKV

SEQ ID NO: 4227 - protein, 15 aa, synthetic construct
  REGION 1..15: note = GFR-binding peptide
QPSRVHHEPLTVLYY

SEQ ID NO: 4228 - protein, 9 aa, synthetic construct
  REGION 1..9: note = GFR-binding peptide
LEPLTMLYY

SEQ ID NO: 4229 - protein, 16 aa, synthetic construct
  REGION 1..16: note = GFR-binding peptide
  VARIANT 2..3: note = Xaa is C or S
PXXAPTKLRPVQVRKI

SEQ ID NO: 4230 - protein, 13 aa, synthetic construct
  REGION 1..13: note = GFR-binding peptide
VPQDLRSVKIAKV

SEQ ID NO: 4231 - protein, 10 aa, synthetic construct
  REGION 1..10: note = GFR-binding peptide
KLEPLTVLYY

SEQ ID NO: 4232 - protein, 15 aa, synthetic construct
  REGION 1..15: note = GFR-binding peptide
  VARIANT 1..2: note = Xaa is C or S
XXVSQDLEPLPIVYY

SEQ ID NO: 4233 - protein, 10 aa, synthetic construct
  REGION 1..10: note = GFR-binding peptide
DLRSVKIAKV

SEQ ID NO: 4234 - protein, 12 aa, synthetic construct
  REGION 1..12: note = GFR-binding peptide
PTELEPLTMLYY

SEQ ID NO: 4235 - protein, 20 aa, synthetic construct
  REGION 1..20: note = GFR-binding peptide
  VARIANT 6..7: note = Xaa is C or S
TVPKPXXAPTQLEPLTVLYY

SEQ ID NO: 4236 - protein, 13 aa, synthetic construct
  REGION 1..13: note = GFR-binding peptide
SRVHHSNITVQIM

SEQ ID NO: 4237 - protein, 11 aa, synthetic construct
  REGION 1..11: note = GFR-binding peptide
QALRSVKIAKV

SEQ ID NO: 4238 - protein, 20 aa, synthetic construct
  REGION 1..20: note = GFR-binding peptide
  VARIANT 6..7: note = Xaa is C or S
TVPKPXXAPTQLSNITVQIM

SEQ ID NO: 4239 - protein, 12 aa, synthetic construct
  REGION 1..12: note = GFR-binding peptide
QVQLRSVKVAKV

SEQ ID NO: 4240 - protein, 12 aa, synthetic construct
  REGION 1..12: note = GFR-binding peptide
PTKLEPLPVVYY

SEQ ID NO: 4241 - protein, 10 aa, synthetic construct
  REGION 1..10: note = GFR-binding peptide
QLRSVKVAKV

SEQ ID NO: 4242 - protein, 20 aa, synthetic construct
  REGION 1..20: note = GFR-binding peptide
  VARIANT 5: note = Xaa is C or S
SSVKXQPSRVHHSNITVQIM

SEQ ID NO: 4243 - protein, 12 aa, synthetic construct
  REGION 1..12: note = GFR-binding peptide
PTELRPVQMRKI

SEQ ID NO: 4244 - protein, 20 aa, synthetic construct
  REGION 1..20: note = GFR-binding peptide
  VARIANT 7: note = Xaa is C or S
NDEGLEXVPTEEEPLPMVYY

SEQ ID NO: 4245 - protein, 19 aa, synthetic construct
  REGION 1..19: note = GFR-binding peptide
  VARIANT 5..6: note = Xaa is C or S
SAAPXXVPQALEPLTILYY

SEQ ID NO: 4246 - protein, 19 aa, synthetic construct
  REGION 1..19: note = GFR-binding peptide
  VARIANT 6: note = Xaa is C or S
DEGLEXVPTEERPVQMRKI

SEQ ID NO: 4247 - protein, 10 aa, synthetic construct
  REGION 1..10: note = GFR-binding peptide
KLEPLPVVYY

SEQ ID NO: 4248 - protein, 13 aa, synthetic construct
  REGION 1..13: note = GFR-binding peptide
VPTEERPVQMRKI

SEQ ID NO: 4249 - protein, 18 aa, synthetic construct
  REGION 1..18: note = GFR-binding peptide
  VARIANT 3: note = Xaa is C or S
VKXQPSRVHHSNITVQIM

SEQ ID NO: 4250 - protein, 16 aa, synthetic construct
  REGION 1..16: note = GFR-binding peptide
  VARIANT 2..3: note = Xaa is C or S
PXXAPTKLRSVKVAKV

SEQ ID NO: 4251 - protein, 18 aa, synthetic construct
  REGION 1..18: note = GFR-binding peptide
  VARIANT 5: note = Xaa is C or S
EGLEXVPTEEEPLPMVYY

SEQ ID NO: 4252 - protein, 17 aa, synthetic construct
  REGION 1..17: note = GFR-binding peptide
  VARIANT 3..4: note = Xaa is C or S
SPXXVSQDLSNITIQIM

SEQ ID NO: 4253 - protein, 12 aa, synthetic construct
  REGION 1..12: note = GFR-binding peptide
RVHHEPLPVVYY

SEQ ID NO: 4254 - protein, 16 aa, synthetic construct
  REGION 1..16: note = GFR-binding peptide
  VARIANT 3: note = Xaa is C or S
PTXAPTKLRPVQVRKI

SEQ ID NO: 4255 - protein, 14 aa, synthetic construct
  REGION 1..14: note = GFR-binding peptide
PSRVHHEPLTVLYY

SEQ ID NO: 4256 - protein, 15 aa, synthetic construct
  REGION 1..15: note = GFR-binding peptide
QPSRVHHEPLPVVYY

SEQ ID NO: 4257 - protein, 10 aa, synthetic construct
  REGION 1..10: note = GFR-binding peptide
QLEPLPVVYY

SEQ ID NO: 4258 - protein, 16 aa, synthetic construct
  REGION 1..16: note = GFR-binding peptide
  VARIANT 2..3: note = Xaa is C or S
PXXAPTQLRSVKVAKV

SEQ ID NO: 4259 - protein, 15 aa, synthetic construct
  REGION 1..15: note = GFR-binding peptide
  VARIANT 1..2: note = Xaa is C or S
XXVPQALRSVKIAKV

SEQ ID NO: 4260 - protein, 16 aa, synthetic construct
  REGION 1..16: note = GFR-binding peptide
  VARIANT 1: note = Xaa is C or S
XRPTQVQLRSVKVAKV

SEQ ID NO: 4261 - protein, 13 aa, synthetic construct
  REGION 1..13: note = GFR-binding peptide
VPTELSNITMQIM

SEQ ID NO: 4262 - protein, 14 aa, synthetic construct
  REGION 1..14: note = GFR-binding peptide
PTQVQLRSVKVAKV

SEQ ID NO: 4263 - protein, 13 aa, synthetic construct
  REGION 1..13: note = GFR-binding peptide
SRVHHRPVQVRKI

SEQ ID NO: 4264 - protein, 10 aa, synthetic construct
  REGION 1..10: note = GFR-binding peptide
ALRSVKIAKV

SEQ ID NO: 4265 - protein, 12 aa, synthetic construct
  REGION 1..12: note = GFR-binding peptide
PTELEPLPMVYY

SEQ ID NO: 4266 - protein, 18 aa, synthetic construct
  REGION 1..18: note = GFR-binding peptide
  VARIANT 3: note = Xaa is C or S
VKXQPSRVHHEPLTVLYY

SEQ ID NO: 4267 - protein, 15 aa, synthetic construct
  REGION 1..15: note = GFR-binding peptide
  VARIANT 1..2: note = Xaa is C or S
XXVSQDLRPVQIRKI

SEQ ID NO: 4268 - protein, 12 aa, synthetic construct
  REGION 1..12: note = GFR-binding peptide
PTKLSNITVQIM

SEQ ID NO: 4269 - protein, 20 aa, synthetic construct
  REGION 1..20: note = GFR-binding peptide
  VARIANT 5: note = Xaa is C or S
SSVKXQPSRVHHEPLPVVYY

SEQ ID NO: 4270 - protein, 16 aa, synthetic construct
  REGION 1..16: note = GFR-binding peptide
  VARIANT 2..3: note = Xaa is C or S
PXXVPQDLRPVQIRKI

SEQ ID NO: 4271 - protein, 12 aa, synthetic construct
  REGION 1..12: note = GFR-binding peptide
QVQLEPLPVVYY

SEQ ID NO: 4272 - protein, 17 aa, synthetic construct
  REGION 1..17: note = GFR-binding peptide
  VARIANT 2: note = Xaa is C or S
QXRPTQVQLSNITVQIM

SEQ ID NO: 4273 - protein, 11 aa, synthetic construct
  REGION 1..11: note = GFR-binding peptide
TEEEPLTMLYY

SEQ ID NO: 4274 - protein, 18 aa, synthetic construct
  REGION 1..18: note = GFR-binding peptide
  VARIANT 5: note = Xaa is C or S
EGLEXVPTEERPVQMRKI

SEQ ID NO: 4275 - protein, 12 aa, synthetic construct
  REGION 1..12: note = GFR-binding peptide
PTQLRPVQVRKI

SEQ ID NO: 4276 - protein, 11 aa, synthetic construct
  REGION 1..11: note = GFR-binding peptide
QALRPVQIRKI

SEQ ID NO: 4277 - protein, 11 aa, synthetic construct
  REGION 1..11: note = GFR-binding peptide
VHHRPVQVRKI

SEQ ID NO: 4278 - protein, 20 aa, synthetic construct
  REGION 1..20: note = GFR-binding peptide
  VARIANT 6..7: note = Xaa is C or S
ASASPXXVPQDLSNITIQIM

SEQ ID NO: 4279 - protein, 14 aa, synthetic construct
  REGION 1..14: note = GFR-binding peptide
  VARIANT 1: note = Xaa is C or S
XVSQDLRSVKIAKV

SEQ ID NO: 4280 - protein, 13 aa, synthetic construct
  REGION 1..13: note = GFR-binding peptide
VSQDLRPVQIRKI

SEQ ID NO: 4281 - protein, 19 aa, synthetic construct
  REGION 1..19: note = GFR-binding peptide
  VARIANT 5..6: note = Xaa is C or S
SAAPXXVPQALSNITIQIM

SEQ ID NO: 4282 - protein, 19 aa, synthetic construct
  REGION 1..19: note = GFR-binding peptide
  VARIANT 5..6: note = Xaa is C or S
IPKAXXVPTELEPLPMVYY

SEQ ID NO: 4283 - protein, 12 aa, synthetic construct
  REGION 1..12: note = GFR-binding peptide
PTEERSVKMAKV

SEQ ID NO: 4284 - protein, 12 aa, synthetic construct
  REGION 1..12: note = GFR-binding peptide
PTKLEPLTVLYY

SEQ ID NO: 4285 - protein, 19 aa, synthetic construct
  REGION 1..19: note = GFR-binding peptide
  VARIANT 6: note = Xaa is C or S
DEGLEXVPTEEEPLPMVYY

SEQ ID NO: 4286 - protein, 17 aa, synthetic construct
  REGION 1..17: note = GFR-binding peptide
  VARIANT 3..4: note = Xaa is C or S
SPXXVPQDLRPVQIRKI

SEQ ID NO: 4287 - protein, 20 aa, synthetic construct
  REGION 1..20: note = GFR-binding peptide
  VARIANT 7: note = Xaa is C or S
NDEGLEXVPTEERPVQMRKI

SEQ ID NO: 4288 - protein, 18 aa, synthetic construct
  REGION 1..18: note = GFR-binding peptide
  VARIANT 4..5: note = Xaa is C or S
AAPXXVPQALRSVKIAKV

SEQ ID NO: 4289 - protein, 13 aa, synthetic construct
  REGION 1..13: note = GFR-binding peptide
VPTEEEPLPMVYY

SEQ ID NO: 4290 - protein, 9 aa, synthetic construct
  REGION 1..9: note = GFR-binding peptide
ERPVQMRKI

SEQ ID NO: 4291 - protein, 13 aa, synthetic construct
  REGION 1..13: note = GFR-binding peptide
VPQALRSVKIAKV

SEQ ID NO: 4292 - protein, 15 aa, synthetic construct
  REGION 1..15: note = GFR-binding peptide
  VARIANT 2: note = Xaa is C or S
TXAPTKLEPLTVLYY

SEQ ID NO: 4293 - protein, 10 aa, synthetic construct
  REGION 1..10: note = GFR-binding peptide
ELEPLPMVYY

SEQ ID NO: 4294 - protein, 16 aa, synthetic construct
  REGION 1..16: note = GFR-binding peptide
  VARIANT 3: note = Xaa is C or S
LEXVPTEERSVKMAKV

SEQ ID NO: 4295 - protein, 13 aa, synthetic construct
  REGION 1..13: note = GFR-binding peptide
SRVHHEPLPVVYY

SEQ ID NO: 4296 - protein, 19 aa, synthetic construct
  REGION 1..19: note = GFR-binding peptide
  VARIANT 5..6: note = Xaa is C or S
SASPXXVSQDLEPLPIVYY

SEQ ID NO: 4297 - protein, 10 aa, synthetic construct
  REGION 1..10: note = GFR-binding peptide
ELRPVQMRKI

SEQ ID NO: 4298 - protein, 16 aa, synthetic construct
  REGION 1..16: note = GFR-binding peptide
  VARIANT 1: note = Xaa is C or S
XQPSRVHHEPLTVLYY

SEQ ID NO: 4299 - protein, 9 aa, synthetic construct
  REGION 1..9: note = GFR-binding peptide
EEPLPMVYY

SEQ ID NO: 4300 - protein, 16 aa, synthetic construct
  REGION 1..16: note = GFR-binding peptide
  VARIANT 1: note = Xaa is C or S
XQPSRVHHSNITVQIM

SEQ ID NO: 4301 - protein, 19 aa, synthetic construct
  REGION 1..19: note = GFR-binding peptide
  VARIANT 5..6: note = Xaa is C or S
SASPXXVPQDLRSVKIAKV

SEQ ID NO: 4302 - protein, 20 aa, synthetic construct
  REGION 1..20: note = GFR-binding peptide
  VARIANT 6..7: note = Xaa is C or S
YVPKPXXAPTKLEPLPVVYY

SEQ ID NO: 4303 - protein, 17 aa, synthetic construct
  REGION 1..17: note = GFR-binding peptide
  VARIANT 4: note = Xaa is C or S
GLEXVPTEEEPLPMVYY

SEQ ID NO: 4304 - protein, 13 aa, synthetic construct
  REGION 1..13: note = GFR-binding peptide
TQVQLRSVKVAKV

SEQ ID NO: 4305 - protein, 10 aa, synthetic construct
  REGION 1..10: note = GFR-binding peptide
ALRPVQIRKI

SEQ ID NO: 4306 - protein, 16 aa, synthetic construct
  REGION 1..16: note = GFR-binding peptide
  VARIANT 2..3: note = Xaa is C or S
PXXVPQALRPVQIRKI

SEQ ID NO: 4307 - protein, 20 aa, synthetic construct
  REGION 1..20: note = GFR-binding peptide
  VARIANT 6..7: note = Xaa is C or S
SIPKAXXVPTELSNITMQIM

SEQ ID NO: 4308 - protein, 12 aa, synthetic construct
  REGION 1..12: note = GFR-binding peptide
PTQLEPLPVVYY

SEQ ID NO: 4309 - protein, 12 aa, synthetic construct
  REGION 1..12: note = GFR-binding peptide
PTELSNITMQIM

SEQ ID NO: 4310 - protein, 20 aa, synthetic construct
  REGION 1..20: note = GFR-binding peptide
  VARIANT 6..7: note = Xaa is C or S
ASASPXXVPQDLRSVKIAKV

SEQ ID NO: 4311 - protein, 17 aa, synthetic construct
  REGION 1..17: note = GFR-binding peptide
  VARIANT 3..4: note = Xaa is C or S
KPXXAPTKLRSVKVAKV

SEQ ID NO: 4312 - protein, 19 aa, synthetic construct
  REGION 1..19: note = GFR-binding peptide
  VARIANT 5..6: note = Xaa is C or S
SASPXXVSQDLRPVQIRKI

SEQ ID NO: 4313 - protein, 9 aa, synthetic construct
  REGION 1..9: note = GFR-binding peptide
LSNITMQIM

SEQ ID NO: 4314 - protein, 15 aa, synthetic construct
  REGION 1..15: note = GFR-binding peptide
  VARIANT 2: note = Xaa is C or S
TXAPTKLSNITVQIM

SEQ ID NO: 4315 - protein, 20 aa, synthetic construct
  REGION 1..20: note = GFR-binding peptide
  VARIANT 6..7: note = Xaa is C or S
ASAAPXXVPQALRSVKIAKV

SEQ ID NO: 4316 - protein, 18 aa, synthetic construct
  REGION 1..18: note = GFR-binding peptide
  VARIANT 4..5: note = Xaa is C or S
PKPXXAPTKLEPLTVLYY

SEQ ID NO: 4317 - protein, 13 aa, synthetic construct
  REGION 1..13: note = GFR-binding peptide
APTQLRPVQVRKI

SEQ ID NO: 4318 - protein, 13 aa, synthetic construct
  REGION 1..13: note = GFR-binding peptide
APTKLSNITVQIM

SEQ ID NO: 4319 - protein, 15 aa, synthetic construct
  REGION 1..15: note = GFR-binding peptide
  VARIANT 1..2: note = Xaa is C or S
XXVPQALRPVQIRKI

SEQ ID NO: 4320 - protein, 14 aa, synthetic construct
  REGION 1..14: note = GFR-binding peptide
  VARIANT 1: note = Xaa is C or S
XVPTELRSVKMAKV

SEQ ID NO: 4321 - protein, 18 aa, synthetic construct
  REGION 1..18: note = GFR-binding peptide
  VARIANT 4..5: note = Xaa is C or S
PKAXXVPTELEPLPMVYY

SEQ ID NO: 4322 - protein, 11 aa, synthetic construct
  REGION 1..11: note = GFR-binding peptide
QDLRSVKIAKV

SEQ ID NO: 4323 - protein, 14 aa, synthetic construct
  REGION 1..14: note = GFR-binding peptide
  VARIANT 1: note = Xaa is C or S
XVPQALSNITIQIM

SEQ ID NO: 4324 - protein, 18 aa, synthetic construct
  REGION 1..18: note = GFR-binding peptide
  VARIANT 4..5: note = Xaa is C or S
ASPXXVSQDLEPLPIVYY

SEQ ID NO: 4325 - protein, 20 aa, synthetic construct
  REGION 1..20: note = GFR-binding peptide
  VARIANT 6..7: note = Xaa is C or S
YVPKPXXAPTKLSNITVQIM

SEQ ID NO: 4326 - protein, 18 aa, synthetic construct
  REGION 1..18: note = GFR-binding peptide
  VARIANT 4..5: note = Xaa is C or S
ASPXXVPQDLRPVQIRKI

SEQ ID NO: 4327 - protein, 17 aa, synthetic construct
  REGION 1..17: note = GFR-binding peptide
  VARIANT 2: note = Xaa is C or S
QXRPTQVQLEPLTVLYY

SEQ ID NO: 4328 - protein, 18 aa, synthetic construct
  REGION 1..18: note = GFR-binding peptide
  VARIANT 3: note = Xaa is C or S
VQXRPTQVQLEPLTVLYY

SEQ ID NO: 4329 - protein, 16 aa, synthetic construct
  REGION 1..16: note = GFR-binding peptide
  VARIANT 1: note = Xaa is C or S
XRPTQVQLSNITVQIM

SEQ ID NO: 4330 - protein, 16 aa, synthetic construct
  REGION 1..16: note = GFR-binding peptide
  VARIANT 2..3: note = Xaa is C or S
PXXVSQDLSNITIQIM

SEQ ID NO: 4331 - protein, 11 aa, synthetic construct
  REGION 1..11: note = GFR-binding peptide
TELRSVKMAKV

SEQ ID NO: 4332 - protein, 20 aa, synthetic construct
  REGION 1..20: note = GFR-binding peptide
  VARIANT 5: note = Xaa is C or S
RNVQXRPTQVQLEPLTVLYY

SEQ ID NO: 4333 - protein, 18 aa, synthetic construct
  REGION 1..18: note = GFR-binding peptide
  VARIANT 4..5: note = Xaa is C or S
AAPXXVPQALRPVQIRKI

SEQ ID NO: 4334 - protein, 13 aa, synthetic construct
  REGION 1..13: note = GFR-binding peptide
VPQALEPLTILYY

SEQ ID NO: 4335 - protein, 10 aa, synthetic construct
  REGION 1..10: note = GFR-binding peptide
HHRPVQVRKI

SEQ ID NO: 4336 - protein, 14 aa, synthetic construct
  REGION 1..14: note = GFR-binding peptide
  VARIANT 1: note = Xaa is C or S
XAPTQLSNITVQIM

SEQ ID NO: 4337 - protein, 19 aa, synthetic construct
  REGION 1..19: note = GFR-binding peptide
  VARIANT 5..6: note = Xaa is C or S
SASPXXVPQDLSNITIQIM

SEQ ID NO: 4338 - protein, 13 aa, synthetic construct
  REGION 1..13: note = GFR-binding peptide
APTQLEPLTVLYY

SEQ ID NO: 4339 - protein, 17 aa, synthetic construct
  REGION 1..17: note = GFR-binding peptide
  VARIANT 3..4: note = Xaa is C or S
APXXVPQALRSVKIAKV

SEQ ID NO: 4340 - protein, 13 aa, synthetic construct
  REGION 1..13: note = GFR-binding peptide
SRVHHEPLTVLYY

SEQ ID NO: 4341 - protein, 12 aa, synthetic construct
  REGION 1..12: note = GFR-binding peptide
PTEERPVQMRKI

SEQ ID NO: 4342 - protein, 16 aa, synthetic construct
  REGION 1..16: note = GFR-binding peptide
  VARIANT 2..3: note = Xaa is C or S
AXXVPTELSNITMQIM

SEQ ID NO: 4343 - protein, 19 aa, synthetic construct
  REGION 1..19: note = GFR-binding peptide
  VARIANT 5..6: note = Xaa is C or S
VPKPXXAPTQLSNITVQIM

SEQ ID NO: 4344 - protein, 10 aa, synthetic construct
  REGION 1..10: note = GFR-binding peptide
EERSVKMAKV

SEQ ID NO: 4345 - protein, 12 aa, synthetic construct
  REGION 1..12: note = GFR-binding peptide
PTQLEPLTVLYY

SEQ ID NO: 4346 - protein, 18 aa, synthetic construct
  REGION 1..18: note = GFR-binding peptide
  VARIANT 4..5: note = Xaa is C or S
PKPXXAPTKLEPLPVVYY

SEQ ID NO: 4347 - protein, 17 aa, synthetic construct
  REGION 1..17: note = GFR-binding peptide
  VARIANT 3..4: note = Xaa is C or S
SPXXVPQDLRSVKIAKV

SEQ ID NO: 4348 - protein, 11 aa, synthetic construct
  REGION 1..11: note = GFR-binding peptide
TKLRSVKVAKV

SEQ ID NO: 4349 - protein, 17 aa, synthetic construct
  REGION 1..17: note = GFR-binding peptide
  VARIANT 3..4: note = Xaa is C or S
KAXXVPTELRSVKMAKV

SEQ ID NO: 4350 - protein, 12 aa, synthetic construct
  REGION 1..12: note = GFR-binding peptide
PTEEEPLTMLYY

SEQ ID NO: 4351 - protein, 12 aa, synthetic construct
  REGION 1..12: note = GFR-binding peptide
PQDLSNITIQIM

SEQ ID NO: 4352 - protein, 11 aa, synthetic construct
  REGION 1..11: note = GFR-binding peptide
TELEPLPMVYY

SEQ ID NO: 4353 - protein, 16 aa, synthetic construct
  REGION 1..16: note = GFR-binding peptide
  VARIANT 2..3: note = Xaa is C or S
PXXAPTKLSNITVQIM

SEQ ID NO: 4354 - protein, 19 aa, synthetic construct
  REGION 1..19: note = GFR-binding peptide
  VARIANT 5..6: note = Xaa is C or S
VPKPXXAPTQLRPVQVRKI

SEQ ID NO: 4355 - protein, 20 aa, synthetic construct
  REGION 1..20: note = GFR-binding peptide
  VARIANT 5: note = Xaa is C or S
SSVKXQPSRVHHEPLTVLYY

SEQ ID NO: 4356 - protein, 19 aa, synthetic construct
  REGION 1..19: note = GFR-binding peptide
  VARIANT 4: note = Xaa is C or S
NVQXRPTQVQLRSVKVAKV

SEQ ID NO: 4357 - protein, 11 aa, synthetic construct
  REGION 1..11: note = GFR-binding peptide
QALSNITIQIM

SEQ ID NO: 4358 - protein, 16 aa, synthetic construct
  REGION 1..16: note = GFR-binding peptide
  VARIANT 2..3: note = Xaa is C or S
PXXVPQALEPLTILYY

SEQ ID NO: 4359 - protein, 15 aa, synthetic construct
  REGION 1..15: note = GFR-binding peptide
  VARIANT 1..2: note = Xaa is C or S
XXAPTQLSNITVQIM

SEQ ID NO: 4360 - protein, 16 aa, synthetic construct
  REGION 1..16: note = GFR-binding peptide
  VARIANT 2..3: note = Xaa is C or S
PXXVSQDLRPVQIRKI

SEQ ID NO: 4361 - protein, 19 aa, synthetic construct
  REGION 1..19: note = GFR-binding peptide
  VARIANT 6: note = Xaa is C or S
VTKPTXAPTKLRSVKVAKV

SEQ ID NO: 4362 - protein, 18 aa, synthetic construct
  REGION 1..18: note = GFR-binding peptide
  VARIANT 4..5: note = Xaa is C or S
AAPXXVPQALSNITIQIM

SEQ ID NO: 4363 - protein, 12 aa, synthetic construct
  REGION 1..12: note = GFR-binding peptide
PQALRSVKIAKV

SEQ ID NO: 4364 - protein, 11 aa, synthetic construct
  REGION 1..11: note = GFR-binding peptide
VHHSNITVQIM

SEQ ID NO: 4365 - protein, 13 aa, synthetic construct
  REGION 1..13: note = GFR-binding peptide
VSQDLSNITIQIM

SEQ ID NO: 4366 - protein, 10 aa, synthetic construct
  REGION 1..10: note = GFR-binding peptide
HHSNITVQIM

SEQ ID NO: 4367 - protein, 18 aa, synthetic construct
  REGION 1..18: note = GFR-binding peptide
  VARIANT 3: note = Xaa is C or S
VQXRPTQVQLEPLPVVYY

SEQ ID NO: 4368 - protein, 18 aa, synthetic construct
  REGION 1..18: note = GFR-binding peptide
  VARIANT 4..5: note = Xaa is C or S
ASPXXVSQDLRSVKIAKV

SEQ ID NO: 4369 - protein, 12 aa, synthetic construct
  REGION 1..12: note = GFR-binding peptide
SQDLRPVQIRKI

SEQ ID NO: 4370 - protein, 19 aa, synthetic construct
  REGION 1..19: note = GFR-binding peptide
  VARIANT 4: note = Xaa is C or S
SVKXQPSRVHHEPLPVVYY

SEQ ID NO: 4371 - protein, 11 aa, synthetic construct
  REGION 1..11: note = GFR-binding peptide
QDLEPLPIVYY

SEQ ID NO: 4372 - protein, 9 aa, synthetic construct
  REGION 1..9: note = GFR-binding peptide
LRSVKIAKV

SEQ ID NO: 4373 - protein, 18 aa, synthetic construct
  REGION 1..18: note = GFR-binding peptide
  VARIANT 4..5: note = Xaa is C or S
PKAXXVPTELEPLTMLYY

SEQ ID NO: 4374 - protein, 12 aa, synthetic construct
  REGION 1..12: note = GFR-binding peptide
PTKLRPVQVRKI

SEQ ID NO: 4375 - protein, 10 aa, synthetic construct
  REGION 1..10: note = GFR-binding peptide
ELEPLTMLYY

SEQ ID NO: 4376 - protein, 14 aa, synthetic construct
  REGION 1..14: note = GFR-binding peptide
  VARIANT 1: note = Xaa is C or S
XAPTKLRSVKVAKV

SEQ ID NO: 4377 - protein, 18 aa, synthetic construct
  REGION 1..18: note = GFR-binding peptide
  VARIANT 4..5: note = Xaa is C or S
ASPXXVPQDLSNITIQIM

SEQ ID NO: 4378 - protein, 18 aa, synthetic construct
  REGION 1..18: note = GFR-binding peptide
  VARIANT 4..5: note = Xaa is C or S
PKPXXAPTKLRPVQVRKI

SEQ ID NO: 4379 - protein, 16 aa, synthetic construct
  REGION 1..16: note = GFR-binding peptide
  VARIANT 3: note = Xaa is C or S
PTXAPTKLSNITVQIM

SEQ ID NO: 4380 - protein, 9 aa, synthetic construct
  REGION 1..9: note = GFR-binding peptide
LRPVQMRKI

SEQ ID NO: 4381 - protein, 12 aa, synthetic construct
  REGION 1..12: note = GFR-binding peptide
PTEEEPLPMVYY

SEQ ID NO: 4382 - protein, 11 aa, synthetic construct
  REGION 1..11: note = GFR-binding peptide
TEERSVKMAKV

SEQ ID NO: 4383 - protein, 10 aa, synthetic construct
  REGION 1..10: note = GFR-binding peptide
ELRSVKMAKV

SEQ ID NO: 4384 - protein, 9 aa, synthetic construct
  REGION 1..9: note = GFR-binding peptide
EEPLTMLYY

SEQ ID NO: 4385 - protein, 12 aa, synthetic construct
  REGION 1..12: note = GFR-binding peptide
PTQLRSVKVAKV

SEQ ID NO: 4386 - protein, 19 aa, synthetic construct
  REGION 1..19: note = GFR-binding peptide
  VARIANT 5..6: note = Xaa is C or S
IPKAXXVPTELSNITMQIM

SEQ ID NO: 4387 - protein, 17 aa, synthetic construct
  REGION 1..17: note = GFR-binding peptide
  VARIANT 3..4: note = Xaa is C or S
KPXXAPTKLEPLPVVYY

SEQ ID NO: 4388 - protein, 13 aa, synthetic construct
  REGION 1..13: note = GFR-binding peptide
VPQALRPVQIRKI

SEQ ID NO: 4389 - protein, 12 aa, synthetic construct
  REGION 1..12: note = GFR-binding peptide
SQDLEPLPIVYY

SEQ ID NO: 4390 - protein, 11 aa, synthetic construct
  REGION 1..11: note = GFR-binding peptide
VHHEPLTVLYY

SEQ ID NO: 4391 - protein, 10 aa, synthetic construct
  REGION 1..10: note = GFR-binding peptide
KLRSVKVAKV

SEQ ID NO: 4392 - protein, 19 aa, synthetic construct
  REGION 1..19: note = GFR-binding peptide
  VARIANT 5..6: note = Xaa is C or S
VPKPXXAPTKLSNITVQIM

SEQ ID NO: 4393 - protein, 11 aa, synthetic construct
  REGION 1..11: note = GFR-binding peptide
VQLRSVKVAKV

SEQ ID NO: 4394 - protein, 16 aa, synthetic construct
  REGION 1..16: note = GFR-binding peptide
  VARIANT 2..3: note = Xaa is C or S
PXXVPQALSNITIQIM

SEQ ID NO: 4395 - protein, 18 aa, synthetic construct
  REGION 1..18: note = GFR-binding peptide
  VARIANT 4..5: note = Xaa is C or S
PKPXXAPTQLRSVKVAKV

SEQ ID NO: 4396 - protein, 11 aa, synthetic construct
  REGION 1..11: note = GFR-binding peptide
TELEPLTMLYY

SEQ ID NO: 4397 - protein, 16 aa, synthetic construct
  REGION 1..16: note = GFR-binding peptide
  VARIANT 2..3: note = Xaa is C or S
PXXVPQDLSNITIQIM

SEQ ID NO: 4398 - protein, 14 aa, synthetic construct
  REGION 1..14: note = GFR-binding peptide
PSRVHHEPLPVVYY

SEQ ID NO: 4399 - protein, 17 aa, synthetic construct
  REGION 1..17: note = GFR-binding peptide
  VARIANT 4: note = Xaa is C or S
KPTXAPTKLSNITVQIM

SEQ ID NO: 4400 - protein, 20 aa, synthetic construct
  REGION 1..20: note = GFR-binding peptide
  VARIANT 6..7: note = Xaa is C or S
ASASPXXVSQDLSNITIQIM

SEQ ID NO: 4401 - protein, 9 aa, synthetic construct
  REGION 1..9: note = GFR-binding peptide
LSNITVQIM

SEQ ID NO: 4402 - protein, 18 aa, synthetic construct
  REGION 1..18: note = GFR-binding peptide
  VARIANT 5: note = Xaa is C or S
EGLEXVPTEERSVKMAKV

SEQ ID NO: 4403 - protein, 16 aa, synthetic construct
  REGION 1..16: note = GFR-binding peptide
  VARIANT 2..3: note = Xaa is C or S
PXXAPTQLRPVQVRKI

SEQ ID NO: 4404 - protein, 15 aa, synthetic construct
  REGION 1..15: note = GFR-binding peptide
  VARIANT 1..2: note = Xaa is C or S
XXVSQDLSNITIQIM

SEQ ID NO: 4405 - protein, 9 aa, synthetic construct
  REGION 1..9: note = GFR-binding peptide
HRPVQVRKI

SEQ ID NO: 4406 - protein, 16 aa, synthetic construct
  REGION 1..16: note = GFR-binding peptide
  VARIANT 3: note = Xaa is C or S
LEXVPTEEEPLPMVYY

SEQ ID NO: 4407 - protein, 17 aa, synthetic construct
  REGION 1..17: note = GFR-binding peptide
  VARIANT 2: note = Xaa is C or S
QXRPTQVQLEPLPVVYY

SEQ ID NO: 4408 - protein, 15 aa, synthetic construct
  REGION 1..15: note = GFR-binding peptide
  VARIANT 2: note = Xaa is C or S
TXAPTKLRPVQVRKI

SEQ ID NO: 4409 - protein, 14 aa, synthetic construct
  REGION 1..14: note = GFR-binding peptide
  VARIANT 1: note = Xaa is C or S
XVPQDLRSVKIAKV

SEQ ID NO: 4410 - protein, 13 aa, synthetic construct
  REGION 1..13: note = GFR-binding peptide
VPQALSNITIQIM

SEQ ID NO: 4411 - protein, 17 aa, synthetic construct
  REGION 1..17: note = GFR-binding peptide
  VARIANT 3..4: note = Xaa is C or S
KAXXVPTELEPLPMVYY

SEQ ID NO: 4412 - protein, 10 aa, synthetic construct
  REGION 1..10: note = GFR-binding peptide
EEEPLPMVYY

SEQ ID NO: 4413 - protein, 18 aa, synthetic construct
  REGION 1..18: note = GFR-binding peptide
  VARIANT 3: note = Xaa is C or S
VQXRPTQVQLSNITVQIM

SEQ ID NO: 4414 - protein, 11 aa, synthetic construct
  REGION 1..11: note = GFR-binding peptide
TKLEPLTVLYY

SEQ ID NO: 4415 - protein, 10 aa, synthetic construct
  REGION 1..10: note = GFR-binding peptide
HHEPLPVVYY

SEQ ID NO: 4416 - protein, 14 aa, synthetic construct
  REGION 1..14: note = GFR-binding peptide
PSRVHHRPVQVRKI

SEQ ID NO: 4417 - protein, 14 aa, synthetic construct
  REGION 1..14: note = GFR-binding peptide
  VARIANT 1: note = Xaa is C or S
XAPTQLRPVQVRKI

SEQ ID NO: 4418 - protein, 15 aa, synthetic construct
  REGION 1..15: note = GFR-binding peptide
  VARIANT 1..2: note = Xaa is C or S
XXAPTQLEPLPVVYY

SEQ ID NO: 4419 - protein, 19 aa, synthetic construct
  REGION 1..19: note = GFR-binding peptide
  VARIANT 5..6: note = Xaa is C or S
SAAPXXVPQALRPVQIRKI

SEQ ID NO: 4420 - protein, 17 aa, synthetic construct
  REGION 1..17: note = GFR-binding peptide
  VARIANT 3..4: note = Xaa is C or S
KPXXAPTKLEPLTVLYY

SEQ ID NO: 4421 - protein, 10 aa, synthetic construct
  REGION 1..10: note = GFR-binding peptide
QLSNITVQIM

SEQ ID NO: 4422 - protein, 20 aa, synthetic construct
  REGION 1..20: note = GFR-binding peptide
  VARIANT 6..7: note = Xaa is C or S
ASAAPXXVPQALEPLTILYY

SEQ ID NO: 4423 - protein, 18 aa, synthetic construct
  REGION 1..18: note = GFR-binding peptide
  VARIANT 5: note = Xaa is C or S
TKPTXAPTKLSNITVQIM

SEQ ID NO: 4424 - protein, 15 aa, synthetic construct
  REGION 1..15: note = GFR-binding peptide
RPTQVQLSNITVQIM

SEQ ID NO: 4425 - protein, 14 aa, synthetic construct
  REGION 1..14: note = GFR-binding peptide
  VARIANT 1: note = Xaa is C or S
XVPQDLEPLPIVYY

SEQ ID NO: 4426 - protein, 20 aa, synthetic construct
  REGION 1..20: note = GFR-binding peptide
  VARIANT 5: note = Xaa is C or S
RNVQXRPTQVQLSNITVQIM

SEQ ID NO: 4427 - protein, 11 aa, synthetic construct
  REGION 1..11: note = GFR-binding peptide
TQLRSVKVAKV

SEQ ID NO: 4428 - protein, 15 aa, synthetic construct
  REGION 1..15: note = GFR-binding peptide
  VARIANT 1..2: note = Xaa is C or S
XXVPQDLSNITIQIM

SEQ ID NO: 4429 - protein, 13 aa, synthetic construct
  REGION 1..13: note = GFR-binding peptide
APTKLRPVQVRKI

SEQ ID NO: 4430 - protein, 18 aa, synthetic construct
  REGION 1..18: note = GFR-binding peptide
  VARIANT 4..5: note = Xaa is C or S
PKPXXAPTQLEPLTVLYY

SEQ ID NO: 4431 - protein, 11 aa, synthetic construct
  REGION 1..11: note = GFR-binding peptide
TELRPVQMRKI

SEQ ID NO: 4432 - protein, 20 aa, synthetic construct
  REGION 1..20: note = GFR-binding peptide
  VARIANT 6..7: note = Xaa is C or S
TVPKPXXAPTQLEPLPVVYY

SEQ ID NO: 4433 - protein, 19 aa, synthetic construct
  REGION 1..19: note = GFR-binding peptide
  VARIANT 4: note = Xaa is C or S
SVKXQPSRVHHRPVQVRKI

SEQ ID NO: 4434 - protein, 13 aa, synthetic construct
  REGION 1..13: note = GFR-binding peptide
APTQLSNITVQIM

SEQ ID NO: 4435 - protein, 16 aa, synthetic construct
  REGION 1..16: note = GFR-binding peptide
  VARIANT 2..3: note = Xaa is C or S
PXXAPTQLEPLPVVYY

SEQ ID NO: 4436 - protein, 13 aa, synthetic construct
  REGION 1..13: note = GFR-binding peptide
TQVQLEPLTVLYY

SEQ ID NO: 4437 - protein, 15 aa, synthetic construct
  REGION 1..15: note = GFR-binding peptide
  VARIANT 1..2: note = Xaa is C or S
XXVPTELRSVKMAKV

SEQ ID NO: 4438 - protein, 11 aa, synthetic construct
  REGION 1..11: note = GFR-binding peptide
VQLSNITVQIM

SEQ ID NO: 4439 - protein, 9 aa, synthetic construct
  REGION 1..9: note = GFR-binding peptide
HEPLPVVYY

SEQ ID NO: 4440 - protein, 20 aa, synthetic construct
  REGION 1..20: note = GFR-binding peptide
  VARIANT 6..7: note = Xaa is C or S
SIPKAXXVPTELRPVQMRKI

SEQ ID NO: 4441 - protein, 17 aa, synthetic construct
  REGION 1..17: note = GFR-binding peptide
  VARIANT 4: note = Xaa is C or S
KPTXAPTKLRPVQVRKI

SEQ ID NO: 4442 - protein, 12 aa, synthetic construct
  REGION 1..12: note = GFR-binding peptide
SQDLSNITIQIM

SEQ ID NO: 4443 - protein, 16 aa, synthetic construct
  REGION 1..16: note = GFR-binding peptide
  VARIANT 2..3: note = Xaa is C or S
AXXVPTELRPVQMRKI

SEQ ID NO: 4444 - protein, 17 aa, synthetic construct
  REGION 1..17: note = GFR-binding peptide
  VARIANT 2: note = Xaa is C or S
KXQPSRVHHSNITVQIM

SEQ ID NO: 4445 - protein, 18 aa, synthetic construct
  REGION 1..18: note = GFR-binding peptide
  VARIANT 4..5: note = Xaa is C or S
AAPXXVPQALEPLTILYY

SEQ ID NO: 4446 - protein, 11 aa, synthetic construct
  REGION 1..11: note = GFR-binding peptide
TKLEPLPVVYY

SEQ ID NO: 4447 - protein, 14 aa, synthetic construct
  REGION 1..14: note = GFR-binding peptide
PTQVQLEPLTVLYY

SEQ ID NO: 4448 - protein, 15 aa, synthetic construct
  REGION 1..15: note = GFR-binding peptide
  VARIANT 1..2: note = Xaa is C or S
XXAPTKLRPVQVRKI

SEQ ID NO: 4449 - protein, 10 aa, synthetic construct
  REGION 1..10: note = GFR-binding peptide
ALSNITIQIM

SEQ ID NO: 4450 - protein, 19 aa, synthetic construct
  REGION 1..19: note = GFR-binding peptide
  VARIANT 5..6: note = Xaa is C or S
VPKPXXAPTQLEPLPVVYY

SEQ ID NO: 4451 - protein, 19 aa, synthetic construct
  REGION 1..19: note = GFR-binding peptide
  VARIANT 4: note = Xaa is C or S
NVQXRPTQVQLEPLPVVYY

SEQ ID NO: 4452 - protein, 13 aa, synthetic construct
  REGION 1..13: note = GFR-binding peptide
TQVQLEPLPVVYY

SEQ ID NO: 4453 - protein, 15 aa, synthetic construct
  REGION 1..15: note = GFR-binding peptide
  VARIANT 1..2: note = Xaa is C or S
XXAPTQLEPLTVLYY

SEQ ID NO: 4454 - protein, 17 aa, synthetic construct
  REGION 1..17: note = GFR-binding peptide
  VARIANT 3..4: note = Xaa is C or S
KPXXAPTQLSNITVQIM

SEQ ID NO: 4455 - protein, 19 aa, synthetic construct
  REGION 1..19: note = GFR-binding peptide
  VARIANT 6: note = Xaa is C or S
VTKPTXAPTKLSNITVQIM

SEQ ID NO: 4456 - protein, 19 aa, synthetic construct
  REGION 1..19: note = GFR-binding peptide
  VARIANT 5..6: note = Xaa is C or S
VPKPXXAPTKLRSVKVAKV

SEQ ID NO: 4457 - protein, 20 aa, synthetic construct
  REGION 1..20: note = GFR-binding peptide
  VARIANT 6..7: note = Xaa is C or S
ASASPXXVSQDLRSVKIAKV

SEQ ID NO: 4458 - protein, 12 aa, synthetic construct
  REGION 1..12: note = GFR-binding peptide
PQALRPVQIRKI

SEQ ID NO: 4459 - protein, 14 aa, synthetic construct
  REGION 1..14: note = GFR-binding peptide
  VARIANT 1: note = Xaa is C or S
XVPQALRPVQIRKI

SEQ ID NO: 4460 - protein, 18 aa, synthetic construct
  REGION 1..18: note = GFR-binding peptide
  VARIANT 4..5: note = Xaa is C or S
PKAXXVPTELRPVQMRKI

SEQ ID NO: 4461 - protein, 9 aa, synthetic construct
  REGION 1..9: note = GFR-binding peptide
LRSVKVAKV

SEQ ID NO: 4462 - protein, 20 aa, synthetic construct
  REGION 1..20: note = GFR-binding peptide
  VARIANT 6..7: note = Xaa is C or S
KIPKAXXVPTELSNITMQIM

SEQ ID NO: 4463 - protein, 18 aa, synthetic construct
  REGION 1..18: note = GFR-binding peptide
  VARIANT 4..5: note = Xaa is C or S
ASPXXVPQDLEPLPIVYY

SEQ ID NO: 4464 - protein, 18 aa, synthetic construct
  REGION 1..18: note = GFR-binding peptide
  VARIANT 4..5: note = Xaa is C or S
ASPXXVSQDLRPVQIRKI

SEQ ID NO: 4465 - protein, 15 aa, synthetic construct
  REGION 1..15: note = GFR-binding peptide
  VARIANT 1..2: note = Xaa is C or S
XXAPTKLSNITVQIM

SEQ ID NO: 4466 - protein, 20 aa, synthetic construct
  REGION 1..20: note = GFR-binding peptide
  VARIANT 6..7: note = Xaa is C or S
ASASPXXVSQDLRPVQIRKI

SEQ ID NO: 4467 - protein, 13 aa, synthetic construct
  REGION 1..13: note = GFR-binding peptide
VPQDLSNITIQIM

SEQ ID NO: 4468 - protein, 11 aa, synthetic construct
  REGION 1..11: note = GFR-binding peptide
VQLEPLPVVYY

SEQ ID NO: 4469 - protein, 20 aa, synthetic construct
  REGION 1..20: note = GFR-binding peptide
  VARIANT 5: note = Xaa is C or S
RNVQXRPTQVQLEPLPVVYY

SEQ ID NO: 4470 - protein, 19 aa, synthetic construct
  REGION 1..19: note = GFR-binding peptide
  VARIANT 5..6: note = Xaa is C or S
VPKPXXAPTKLRPVQVRKI

SEQ ID NO: 4471 - protein, 17 aa, synthetic construct
  REGION 1..17: note = GFR-binding peptide
  VARIANT 4: note = Xaa is C or S
KPTXAPTKLRSVKVAKV

SEQ ID NO: 4472 - protein, 12 aa, synthetic construct
  REGION 1..12: note = GFR-binding peptide
PQALEPLTILYY

SEQ ID NO: 4473 - protein, 20 aa, synthetic construct
  REGION 1..20: note = GFR-binding peptide
  VARIANT 6..7: note = Xaa is C or S
TVPKPXXAPTQLRSVKVAKV

SEQ ID NO: 4474 - protein, 9 aa, synthetic construct
  REGION 1..9: note = GFR-binding peptide
LSNITIQIM

SEQ ID NO: 4475 - protein, 18 aa, synthetic construct
  REGION 1..18: note = GFR-binding peptide
  VARIANT 4..5: note = Xaa is C or S
ASPXXVPQDLRSVKIAKV

SEQ ID NO: 4476 - protein, 12 aa, synthetic construct
  REGION 1..12: note = GFR-binding peptide
PQDLRPVQIRKI

SEQ ID NO: 4477 - protein, 11 aa, synthetic construct
  REGION 1..11: note = GFR-binding peptide
TKLRPVQVRKI

SEQ ID NO: 4478 - protein, 20 aa, synthetic construct
  REGION 1..20: note = GFR-binding peptide
  VARIANT 6..7: note = Xaa is C or S
KIPKAXXVPTELRPVQMRKI

SEQ ID NO: 4479 - protein, 16 aa, synthetic construct
  REGION 1..16: note = GFR-binding peptide
  VARIANT 3: note = Xaa is C or S
LEXVPTEEEPLTMLYY

SEQ ID NO: 4480 - protein, 18 aa, synthetic construct
  REGION 1..18: note = GFR-binding peptide
  VARIANT 4..5: note = Xaa is C or S
ASPXXVSQDLSNITIQIM

SEQ ID NO: 4481 - protein, 18 aa, synthetic construct
  REGION 1..18: note = GFR-binding peptide
  VARIANT 5: note = Xaa is C or S
TKPTXAPTKLEPLPVVYY

SEQ ID NO: 4482 - protein, 14 aa, synthetic construct
  REGION 1..14: note = GFR-binding peptide
  VARIANT 1: note = Xaa is C or S
XAPTQLRSVKVAKV

SEQ ID NO: 4483 - protein, 15 aa, synthetic construct
  REGION 1..15: note = GFR-binding peptide
  VARIANT 1..2: note = Xaa is C or S
XXVPQALSNITIQIM

SEQ ID NO: 4484 - protein, 14 aa, synthetic construct
  REGION 1..14: note = GFR-binding peptide
  VARIANT 1: note = Xaa is C or S
XVPQDLRPVQIRKI

SEQ ID NO: 4485 - protein, 15 aa, synthetic construct
  REGION 1..15: note = GFR-binding peptide
  VARIANT 1..2: note = Xaa is C or S
XXVPQALEPLTILYY

SEQ ID NO: 4486 - protein, 18 aa, synthetic construct
  REGION 1..18: note = GFR-binding peptide
  VARIANT 4..5: note = Xaa is C or S
PKPXXAPTKLSNITVQIM

SEQ ID NO: 4487 - protein, 15 aa, synthetic construct
  REGION 1..15: note = GFR-binding peptide
RPTQVQLEPLPVVYY

SEQ ID NO: 4488 - protein, 13 aa, synthetic construct
  REGION 1..13: note = GFR-binding peptide
APTKLEPLTVLYY

SEQ ID NO: 4489 - protein, 18 aa, synthetic construct
  REGION 1..18: note = GFR-binding peptide
  VARIANT 4..5: note = Xaa is C or S
PKAXXVPTELRSVKMAKV

SEQ ID NO: 4490 - protein, 12 aa, synthetic construct
  REGION 1..12: note = GFR-binding peptide
PQALSNITIQIM

SEQ ID NO: 4491 - protein, 20 aa, synthetic construct
  REGION 1..20: note = GFR-binding peptide
  VARIANT 6..7: note = Xaa is C or S
KIPKAXXVPTELEPLPMVYY

SEQ ID NO: 4492 - protein, 10 aa, synthetic construct
  REGION 1..10: note = GFR-binding peptide
ALEPLTILYY

SEQ ID NO: 4493 - protein, 14 aa, synthetic construct
  REGION 1..14: note = GFR-binding peptide
  VARIANT 1: note = Xaa is C or S
XVPQALEPLTILYY

SEQ ID NO: 4494 - protein, 19 aa, synthetic construct
  REGION 1..19: note = GFR-binding peptide
  VARIANT 5..6: note = Xaa is C or S
SAAPXXVPQALRSVKIAKV

SEQ ID NO: 4495 - protein, 16 aa, synthetic construct
  REGION 1..16: note = GFR-binding peptide
  VARIANT 1: note = Xaa is C or S
XRPTQVQLEPLTVLYY

SEQ ID NO: 4496 - protein, 14 aa, synthetic construct
  REGION 1..14: note = GFR-binding peptide
  VARIANT 1: note = Xaa is C or S
XVSQDLSNITIQIM

SEQ ID NO: 4497 - protein, 17 aa, synthetic construct
  REGION 1..17: note = GFR-binding peptide
  VARIANT 3..4: note = Xaa is C or S
KAXXVPTELRPVQMRKI

SEQ ID NO: 4498 - protein, 15 aa, synthetic construct
  REGION 1..15: note = GFR-binding peptide
  VARIANT 2: note = Xaa is C or S
EXVPTEEEPLPMVYY

SEQ ID NO: 4499 - protein, 18 aa, synthetic construct
  REGION 1..18: note = GFR-binding peptide
  VARIANT 4..5: note = Xaa is C or S
PKPXXAPTQLRPVQVRKI

SEQ ID NO: 4500 - protein, 17 aa, synthetic construct
  REGION 1..17: note = GFR-binding peptide
  VARIANT 2: note = Xaa is C or S
KXQPSRVHHEPLTVLYY

SEQ ID NO: 4501 - protein, 15 aa, synthetic construct
  REGION 1..15: note = GFR-binding peptide
  VARIANT 1..2: note = Xaa is C or S
XXAPTQLRPVQVRKI

SEQ ID NO: 4502 - protein, 10 aa, synthetic construct
  REGION 1..10: note = GFR-binding peptide
EEEPLTMLYY

SEQ ID NO: 4503 - protein, 9 aa, synthetic construct
  REGION 1..9: note = GFR-binding peptide
HEPLTVLYY

SEQ ID NO: 4504 - protein, 17 aa, synthetic construct
  REGION 1..17: note = GFR-binding peptide
  VARIANT 2: note = Xaa is C or S
QXRPTQVQLRSVKVAKV

SEQ ID NO: 4505 - protein, 13 aa, synthetic construct
  REGION 1..13: note = GFR-binding peptide
VPTELRSVKMAKV

SEQ ID NO: 4506 - protein, 17 aa, synthetic construct
  REGION 1..17: note = GFR-binding peptide
  VARIANT 3..4: note = Xaa is C or S
KPXXAPTKLSNITVQIM

SEQ ID NO: 4507 - protein, 15 aa, synthetic construct
  REGION 1..15: note = GFR-binding peptide
  VARIANT 1..2: note = Xaa is C or S
XXAPTKLEPLTVLYY

SEQ ID NO: 4508 - protein, 20 aa, synthetic construct
  REGION 1..20: note = GFR-binding peptide
  VARIANT 7: note = Xaa is C or S
HVTKPTXAPTKLEPLTVLYY

SEQ ID NO: 4509 - protein, 10 aa, synthetic construct
  REGION 1..10: note = GFR-binding peptide
DLSNITIQIM

SEQ ID NO: 4510 - protein, 12 aa, synthetic construct
  REGION 1..12: note = GFR-binding peptide
PQDLEPLPIVYY

SEQ ID NO: 4511 - protein, 14 aa, synthetic construct
  REGION 1..14: note = GFR-binding peptide
  VARIANT 1: note = Xaa is C or S
XAPTKLEPLPVVYY

SEQ ID NO: 4512 - protein, 19 aa, synthetic construct
  REGION 1..19: note = GFR-binding peptide
  VARIANT 4: note = Xaa is C or S
SVKXQPSRVHHEPLTVLYY

SEQ ID NO: 4513 - protein, 20 aa, synthetic construct
  REGION 1..20: note = GFR-binding peptide
  VARIANT 6..7: note = Xaa is C or S
SIPKAXXVPTELRSVKMAKV

SEQ ID NO: 4514 - protein, 19 aa, synthetic construct
  REGION 1..19: note = GFR-binding peptide
  VARIANT 4: note = Xaa is C or S
SVKXQPSRVHHSNITVQIM

SEQ ID NO: 4515 - protein, 18 aa, synthetic construct
  REGION 1..18: note = GFR-binding peptide
  VARIANT 4..5: note = Xaa is C or S
PKPXXAPTQLEPLPVVYY

SEQ ID NO: 4516 - protein, 16 aa, synthetic construct
  REGION 1..16: note = GFR-binding peptide
  VARIANT 2..3: note = Xaa is C or S
PXXAPTQLEPLTVLYY

SEQ ID NO: 4517 - protein, 19 aa, synthetic construct
  REGION 1..19: note = GFR-binding peptide
  VARIANT 6: note = Xaa is C or S
VTKPTXAPTKLEPLPVVYY

SEQ ID NO: 4518 - protein, 13 aa, synthetic construct
  REGION 1..13: note = GFR-binding peptide
APTQLEPLPVVYY

SEQ ID NO: 4519 - protein, 19 aa, synthetic construct
  REGION 1..19: note = GFR-binding peptide
  VARIANT 4: note = Xaa is C or S
NVQXRPTQVQLSNITVQIM

SEQ ID NO: 4520 - protein, 16 aa, synthetic construct
  REGION 1..16: note = GFR-binding peptide
  VARIANT 2..3: note = Xaa is C or S
PXXAPTQLSNITVQIM

SEQ ID NO: 4521 - protein, 20 aa, synthetic construct
  REGION 1..20: note = GFR-binding peptide
  VARIANT 7: note = Xaa is C or S
HVTKPTXAPTKLSNITVQIM

SEQ ID NO: 4522 - protein, 9 aa, synthetic construct
  REGION 1..9: note = GFR-binding peptide
HSNITVQIM

SEQ ID NO: 4523 - protein, 16 aa, synthetic construct
  REGION 1..16: note = GFR-binding peptide
  VARIANT 2..3: note = Xaa is C or S
AXXVPTELEPLPMVYY

SEQ ID NO: 4524 - protein, 19 aa, synthetic construct
  REGION 1..19: note = GFR-binding peptide
  VARIANT 4: note = Xaa is C or S
NVQXRPTQVQLEPLTVLYY

SEQ ID NO: 4525 - protein, 15 aa, synthetic construct
  REGION 1..15: note = GFR-binding peptide
  VARIANT 2: note = Xaa is C or S
EXVPTEERPVQMRKI

SEQ ID NO: 4526 - protein, 14 aa, synthetic construct
  REGION 1..14: note = GFR-binding peptide
  VARIANT 1: note = Xaa is C or S
XAPTKLRPVQVRKI

SEQ ID NO: 4527 - protein, 18 aa, synthetic construct
  REGION 1..18: note = GFR-binding peptide
  VARIANT 4..5: note = Xaa is C or S
PPTXXVPTRLNAISILYF

SEQ ID NO: 4528 - protein, 16 aa, synthetic construct
  REGION 1..16: note = GFR-binding peptide
  VARIANT 2..3: note = Xaa is C or S
PXXTPTKMNAISMLYF

SEQ ID NO: 4529 - protein, 14 aa, synthetic construct
  REGION 1..14: note = GFR-binding peptide
  VARIANT 1: note = Xaa is C or S
XVPTKLNAISILYF

SEQ ID NO: 4530 - protein, 9 aa, synthetic construct
  REGION 1..9: note = GFR-binding peptide
TNAISMLYF

SEQ ID NO: 4531 - protein, 17 aa, synthetic construct
  REGION 1..17: note = GFR-binding peptide
  VARIANT 3..4: note = Xaa is C or S
KAXXAPTKLNAISVLYF

SEQ ID NO: 4532 - protein, 20 aa, synthetic construct
  REGION 1..20: note = GFR-binding peptide
  VARIANT 6..7: note = Xaa is C or S
AAPASXXVPARLNAISILYF

SEQ ID NO: 4533 - protein, 15 aa, synthetic construct
  REGION 1..15: note = GFR-binding peptide
  VARIANT 1..2: note = Xaa is C or S
XXAPVKTNAISMLYF

SEQ ID NO: 4534 - protein, 12 aa, synthetic construct
  REGION 1..12: note = GFR-binding peptide
PTELNAISMLYF

SEQ ID NO: 4535 - protein, 12 aa, synthetic construct
  REGION 1..12: note = GFR-binding peptide
PARLNAISILYF

SEQ ID NO: 4536 - protein, 17 aa, synthetic construct
  REGION 1..17: note = GFR-binding peptide
  VARIANT 3..4: note = Xaa is C or S
KAXXVPTKLNAISVLYF

SEQ ID NO: 4537 - protein, 9 aa, synthetic construct
  REGION 1..9: note = GFR-binding peptide
MNAISMLYF

SEQ ID NO: 4538 - protein, 19 aa, synthetic construct
  REGION 1..19: note = GFR-binding peptide
  VARIANT 5..6: note = Xaa is C or S
TPPTXXVPTRLNAISILYF

SEQ ID NO: 4539 - protein, 15 aa, synthetic construct
  REGION 1..15: note = GFR-binding peptide
  VARIANT 1..2: note = Xaa is C or S
XXTPTKMNAISMLYF

SEQ ID NO: 4540 - protein, 11 aa, synthetic construct
  REGION 1..11: note = GFR-binding peptide
TKMNAISMLYF

SEQ ID NO: 4541 - protein, 10 aa, synthetic construct
  REGION 1..10: note = GFR-binding peptide
ELNAISMLYF

SEQ ID NO: 4542 - protein, 10 aa, synthetic construct
  REGION 1..10: note = GFR-binding peptide
KLNAISILYF

SEQ ID NO: 4543 - protein, 17 aa, synthetic construct
  REGION 1..17: note = GFR-binding peptide
  VARIANT 3..4: note = Xaa is C or S
GPXXTPTKMNAISMLYF

SEQ ID NO: 4544 - protein, 18 aa, synthetic construct
  REGION 1..18: note = GFR-binding peptide
  VARIANT 4..5: note = Xaa is C or S
PKAXXAPTKLNAISVLYF

SEQ ID NO: 4545 - protein, 16 aa, synthetic construct
  REGION 1..16: note = GFR-binding peptide
  VARIANT 2..3: note = Xaa is C or S
TXXVPTRLNAISILYF

SEQ ID NO: 4546 - protein, 20 aa, synthetic construct
  REGION 1..20: note = GFR-binding peptide
  VARIANT 6..7: note = Xaa is C or S
STPPTXXVPTRLNAISILYF

SEQ ID NO: 4547 - protein, 13 aa, synthetic construct
  REGION 1..13: note = GFR-binding peptide
VPTKLNAISVLYF

SEQ ID NO: 4548 - protein, 20 aa, synthetic construct
  REGION 1..20: note = GFR-binding peptide
  VARIANT 6..7: note = Xaa is C or S
KIPKAXXVPTELNAISMLYF

SEQ ID NO: 4549 - protein, 19 aa, synthetic construct
  REGION 1..19: note = GFR-binding peptide
  VARIANT 5..6: note = Xaa is C or S
VPKAXXAPTKLNAISVLYF

SEQ ID NO: 4550 - protein, 13 aa, synthetic construct
  REGION 1..13: note = GFR-binding peptide
VPTRLNAISILYF

SEQ ID NO: 4551 - protein, 19 aa, synthetic construct
  REGION 1..19: note = GFR-binding peptide
  VARIANT 5..6: note = Xaa is C or S
IPKAXXVPTELNAISMLYF

SEQ ID NO: 4552 - protein, 16 aa, synthetic construct
  REGION 1..16: note = GFR-binding peptide
  VARIANT 2..3: note = Xaa is C or S
SXXVPARLNAISILYF

SEQ ID NO: 4553 - protein, 10 aa, synthetic construct
  REGION 1..10: note = GFR-binding peptide
RLNAISILYF

SEQ ID NO: 4554 - protein, 15 aa, synthetic construct
  REGION 1..15: note = GFR-binding peptide
  VARIANT 1..2: note = Xaa is C or S
XXVPTELNAISMLYF

SEQ ID NO: 4555 - protein, 20 aa, synthetic construct
  REGION 1..20: note = GFR-binding peptide
  VARIANT 6..7: note = Xaa is C or S
SIPKAXXVPTELNAISMLYF

SEQ ID NO: 4556 - protein, 19 aa, synthetic construct
  REGION 1..19: note = GFR-binding peptide
  VARIANT 5..6: note = Xaa is C or S
APASXXVPARLNAISILYF

SEQ ID NO: 4557 - protein, 13 aa, synthetic construct
  REGION 1..13: note = GFR-binding peptide
VPTKLNAISILYF

SEQ ID NO: 4558 - protein, 16 aa, synthetic construct
  REGION 1..16: note = GFR-binding peptide
  VARIANT 2..3: note = Xaa is C or S
AXXVPTELNAISMLYF

SEQ ID NO: 4559 - protein, 11 aa, synthetic construct
  REGION 1..11: note = GFR-binding peptide
ARLNAISILYF

SEQ ID NO: 4560 - protein, 18 aa, synthetic construct
  REGION 1..18: note = GFR-binding peptide
  VARIANT 4..5: note = Xaa is C or S
AGPXXTPTKMNAISMLYF

SEQ ID NO: 4561 - protein, 15 aa, synthetic construct
  REGION 1..15: note = GFR-binding peptide
  VARIANT 1..2: note = Xaa is C or S
XXVPTKLNAISILYF

SEQ ID NO: 4562 - protein, 20 aa, synthetic construct
  REGION 1..20: note = GFR-binding peptide
  VARIANT 6..7: note = Xaa is C or S
KASKAXXVPTKLNAISILYF

SEQ ID NO: 4563 - protein, 9 aa, synthetic construct
  REGION 1..9: note = GFR-binding peptide
LNAISMLYF

SEQ ID NO: 4564 - protein, 13 aa, synthetic construct
  REGION 1..13: note = GFR-binding peptide
VPARLNAISILYF

SEQ ID NO: 4565 - protein, 13 aa, synthetic construct
  REGION 1..13: note = GFR-binding peptide
VPTELNAISMLYF

SEQ ID NO: 4566 - protein, 16 aa, synthetic construct
  REGION 1..16: note = GFR-binding peptide
  VARIANT 2..3: note = Xaa is C or S
AXXAPTKLNAISVLYF

SEQ ID NO: 4567 - protein, 16 aa, synthetic construct
  REGION 1..16: note = GFR-binding peptide
  VARIANT 2..3: note = Xaa is C or S
AXXVPTKLNAISILYF

SEQ ID NO: 4568 - protein, 19 aa, synthetic construct
  REGION 1..19: note = GFR-binding peptide
  VARIANT 5..6: note = Xaa is C or S
SAGPXXTPTKMNAISMLYF

SEQ ID NO: 4569 - protein, 18 aa, synthetic construct
  REGION 1..18: note = GFR-binding peptide
  VARIANT 4..5: note = Xaa is C or S
SKAXXVPTKLNAISILYF

SEQ ID NO: 4570 - protein, 20 aa, synthetic construct
  REGION 1..20: note = GFR-binding peptide
  VARIANT 6..7: note = Xaa is C or S
GSAGPXXTPTKMNAISMLYF

SEQ ID NO: 4571 - protein, 15 aa, synthetic construct
  REGION 1..15: note = GFR-binding peptide
  VARIANT 1..2: note = Xaa is C or S
XXVPTKLNAISVLYF

SEQ ID NO: 4572 - protein, 10 aa, synthetic construct
  REGION 1..10: note = GFR-binding peptide
KMNAISMLYF

SEQ ID NO: 4573 - protein, 15 aa, synthetic construct
  REGION 1..15: note = GFR-binding peptide
  VARIANT 1..2: note = Xaa is C or S
XXVPTRLNAISILYF

SEQ ID NO: 4574 - protein, 10 aa, synthetic construct
  REGION 1..10: note = GFR-binding peptide
KTNAISMLYF

SEQ ID NO: 4575 - protein, 11 aa, synthetic construct
  REGION 1..11: note = GFR-binding peptide
TRLNAISILYF

SEQ ID NO: 4576 - protein, 19 aa, synthetic construct
  REGION 1..19: note = GFR-binding peptide
  VARIANT 5..6: note = Xaa is C or S
VGKAXXVPTKLNAISVLYF

SEQ ID NO: 4577 - protein, 17 aa, synthetic construct
  REGION 1..17: note = GFR-binding peptide
  VARIANT 3..4: note = Xaa is C or S
ASXXVPARLNAISILYF

SEQ ID NO: 4578 - protein, 14 aa, synthetic construct
  REGION 1..14: note = GFR-binding peptide
  VARIANT 1: note = Xaa is C or S
XVPARLNAISILYF

SEQ ID NO: 4579 - protein, 14 aa, synthetic construct
  REGION 1..14: note = GFR-binding peptide
  VARIANT 1: note = Xaa is C or S
XVPTELNAISMLYF

SEQ ID NO: 4580 - protein, 16 aa, synthetic construct
  REGION 1..16: note = GFR-binding peptide
  VARIANT 2..3: note = Xaa is C or S
AXXVPTKLNAISVLYF

SEQ ID NO: 4581 - protein, 13 aa, synthetic construct
  REGION 1..13: note = GFR-binding peptide
TPTKMNAISMLYF

SEQ ID NO: 4582 - protein, 18 aa, synthetic construct
  REGION 1..18: note = GFR-binding peptide
  VARIANT 4..5: note = Xaa is C or S
PSTXXAPVKTNAISMLYF

SEQ ID NO: 4583 - protein, 20 aa, synthetic construct
  REGION 1..20: note = GFR-binding peptide
  VARIANT 6..7: note = Xaa is C or S
RVPSTXXAPVKTNAISMLYF

SEQ ID NO: 4584 - protein, 19 aa, synthetic construct
  REGION 1..19: note = GFR-binding peptide
  VARIANT 5..6: note = Xaa is C or S
ASKAXXVPTKLNAISILYF

SEQ ID NO: 4585 - protein, 18 aa, synthetic construct
  REGION 1..18: note = GFR-binding peptide
  VARIANT 4..5: note = Xaa is C or S
PASXXVPARLNAISILYF

SEQ ID NO: 4586 - protein, 14 aa, synthetic construct
  REGION 1..14: note = GFR-binding peptide
  VARIANT 1: note = Xaa is C or S
XVPTKLNAISVLYF

SEQ ID NO: 4587 - protein, 14 aa, synthetic construct
  REGION 1..14: note = GFR-binding peptide
  VARIANT 1: note = Xaa is C or S
XVPTRLNAISILYF

SEQ ID NO: 4588 - protein, 16 aa, synthetic construct
  REGION 1..16: note = GFR-binding peptide
  VARIANT 2..3: note = Xaa is C or S
TXXAPVKTNAISMLYF

SEQ ID NO: 4589 - protein, 12 aa, synthetic construct
  REGION 1..12: note = GFR-binding peptide
PTKLNAISILYF

SEQ ID NO: 4590 - protein, 14 aa, synthetic construct
  REGION 1..14: note = GFR-binding peptide
  VARIANT 1: note = Xaa is C or S
XAPVKTNAISMLYF

SEQ ID NO: 4591 - protein, 18 aa, synthetic construct
  REGION 1..18: note = GFR-binding peptide
  VARIANT 4..5: note = Xaa is C or S
PKAXXVPTELNAISMLYF

SEQ ID NO: 4592 - protein, 12 aa, synthetic construct
  REGION 1..12: note = GFR-binding peptide
PVKTNAISMLYF

SEQ ID NO: 4593 - protein, 13 aa, synthetic construct
  REGION 1..13: note = GFR-binding peptide
APVKTNAISMLYF

SEQ ID NO: 4594 - protein, 14 aa, synthetic construct
  REGION 1..14: note = GFR-binding peptide
  VARIANT 1: note = Xaa is C or S
XTPTKMNAISMLYF

SEQ ID NO: 4595 - protein, 19 aa, synthetic construct
  REGION 1..19: note = GFR-binding peptide
  VARIANT 5..6: note = Xaa is C or S
VPSTXXAPVKTNAISMLYF

SEQ ID NO: 4596 - protein, 17 aa, synthetic construct
  REGION 1..17: note = GFR-binding peptide
  VARIANT 3..4: note = Xaa is C or S
KAXXVPTKLNAISILYF

SEQ ID NO: 4597 - protein, 18 aa, synthetic construct
  REGION 1..18: note = GFR-binding peptide
  VARIANT 4..5: note = Xaa is C or S
GKAXXVPTKLNAISVLYF

SEQ ID NO: 4598 - protein, 17 aa, synthetic construct
  REGION 1..17: note = GFR-binding peptide
  VARIANT 3..4: note = Xaa is C or S
PTXXVPTRLNAISILYF

SEQ ID NO: 4599 - protein, 15 aa, synthetic construct
  REGION 1..15: note = GFR-binding peptide
  VARIANT 1..2: note = Xaa is C or S
XXVPARLNAISILYF

SEQ ID NO: 4600 - protein, 11 aa, synthetic construct
  REGION 1..11: note = GFR-binding peptide
VKTNAISMLYF

SEQ ID NO: 4601 - protein, 17 aa, synthetic construct
  REGION 1..17: note = GFR-binding peptide
  VARIANT 3..4: note = Xaa is C or S
KAXXVPTELNAISMLYF

SEQ ID NO: 4602 - protein, 12 aa, synthetic construct
  REGION 1..12: note = GFR-binding peptide
PTKMNAISMLYF

SEQ ID NO: 4603 - protein, 12 aa, synthetic construct
  REGION 1..12: note = GFR-binding peptide
PTRLNAISILYF

SEQ ID NO: 4604 - protein, 11 aa, synthetic construct
  REGION 1..11: note = GFR-binding peptide
TKLNAISILYF

SEQ ID NO: 4605 - protein, 11 aa, synthetic construct
  REGION 1..11: note = GFR-binding peptide
TELNAISMLYF

SEQ ID NO: 4606 - protein, 17 aa, synthetic construct
  REGION 1..17: note = GFR-binding peptide
  VARIANT 3..4: note = Xaa is C or S
STXXAPVKTNAISMLYF

SEQ ID NO: 4607 - protein, 9 aa, synthetic construct
  REGION 1..9: note = GFR-binding peptide
LNAISILYF

SEQ ID NO: 4608 - protein, 13 aa, synthetic construct
  REGION 1..13: note = GFR-binding peptide
FYLVSIANLKTPA

SEQ ID NO: 4609 - protein, 18 aa, synthetic construct
  REGION 1..18: note = GFR-binding peptide
  VARIANT 14..15: note = Xaa is C or S
FYLISIANLRTPVXXTPP

SEQ ID NO: 4610 - protein, 16 aa, synthetic construct
  REGION 1..16: note = GFR-binding peptide
  VARIANT 14..15: note = Xaa is C or S
FYLMSIANMKTPTXXP

SEQ ID NO: 4611 - protein, 14 aa, synthetic construct
  REGION 1..14: note = GFR-binding peptide
  VARIANT 14: note = Xaa is C or S
FYLISIANLKTPVX

SEQ ID NO: 4612 - protein, 10 aa, synthetic construct
  REGION 1..10: note = GFR-binding peptide
FYLVSIANLQ

SEQ ID NO: 4613 - protein, 9 aa, synthetic construct
  REGION 1..9: note = GFR-binding peptide
FYLMSIANT

SEQ ID NO: 4614 - protein, 17 aa, synthetic construct
  REGION 1..17: note = GFR-binding peptide
  VARIANT 14..15: note = Xaa is C or S
FYLVSIANLKTPAXXAK

SEQ ID NO: 4615 - protein, 20 aa, synthetic construct
  REGION 1..20: note = GFR-binding peptide
  VARIANT 14..15: note = Xaa is C or S
FYLISIANLRAPVXXSAPAA

SEQ ID NO: 4616 - protein, 14 aa, synthetic construct
  REGION 1..14: note = GFR-binding peptide
  VARIANT 14: note = Xaa is C or S
FYLVSIANLQTPAX

SEQ ID NO: 4617 - protein, 15 aa, synthetic construct
  REGION 1..15: note = GFR-binding peptide
  VARIANT 14..15: note = Xaa is C or S
FYLMSIANTKVPAXX

SEQ ID NO: 4618 - protein, 14 aa, synthetic construct
  REGION 1..14: note = GFR-binding peptide
  VARIANT 14: note = Xaa is C or S
FYLVSIANLKTPAX

SEQ ID NO: 4619 - protein, 12 aa, synthetic construct
  REGION 1..12: note = GFR-binding peptide
FYLMSIANLETP

SEQ ID NO: 4620 - protein, 15 aa, synthetic construct
  REGION 1..15: note = GFR-binding peptide
  VARIANT 14: note = Xaa is C or S
FYLVSIANLKTPAXT

SEQ ID NO: 4621 - protein, 12 aa, synthetic construct
  REGION 1..12: note = GFR-binding peptide
FYLISIANLRAP

SEQ ID NO: 4622 - protein, 20 aa, synthetic construct
  REGION 1..20: note = GFR-binding peptide
  VARIANT 14: note = Xaa is C or S
FYLVSIANLKTPAXTPKTVH

SEQ ID NO: 4623 - protein, 17 aa, synthetic construct
  REGION 1..17: note = GFR-binding peptide
  VARIANT 14..15: note = Xaa is C or S
FYLVSIANLKTPVXXAK

SEQ ID NO: 4624 - protein, 9 aa, synthetic construct
  REGION 1..9: note = GFR-binding peptide
FYLMSIANM

SEQ ID NO: 4625 - protein, 19 aa, synthetic construct
  REGION 1..19: note = GFR-binding peptide
  VARIANT 14..15: note = Xaa is C or S
FYLISIANLRTPVXXTPPT

SEQ ID NO: 4626 - protein, 15 aa, synthetic construct
  REGION 1..15: note = GFR-binding peptide
  VARIANT 14..15: note = Xaa is C or S
FYLMSIANMKTPTXX

SEQ ID NO: 4627 - protein, 11 aa, synthetic construct
  REGION 1..11: note = GFR-binding peptide
FYLMSIANMKT

SEQ ID NO: 4628 - protein, 10 aa, synthetic construct
  REGION 1..10: note = GFR-binding peptide
FYLMSIANLE

SEQ ID NO: 4629 - protein, 10 aa, synthetic construct
  REGION 1..10: note = GFR-binding peptide
FYLISIANLK

SEQ ID NO: 4630 - protein, 19 aa, synthetic construct
  REGION 1..19: note = GFR-binding peptide
  VARIANT 14: note = Xaa is C or S
FYLVSIANLKTPAXTPKTV

SEQ ID NO: 4631 - protein, 17 aa, synthetic construct
  REGION 1..17: note = GFR-binding peptide
  VARIANT 14..15: note = Xaa is C or S
FYLMSIANMKTPTXXPG

SEQ ID NO: 4632 - protein, 16 aa, synthetic construct
  REGION 1..16: note = GFR-binding peptide
  VARIANT 14..15: note = Xaa is C or S
FYLVSIANLKTPAXXP

SEQ ID NO: 4633 - protein, 18 aa, synthetic construct
  REGION 1..18: note = GFR-binding peptide
  VARIANT 14..15: note = Xaa is C or S
FYLVSIANLKTPAXXAKP

SEQ ID NO: 4634 - protein, 16 aa, synthetic construct
  REGION 1..16: note = GFR-binding peptide
  VARIANT 14..15: note = Xaa is C or S
FYLISIANLRTPVXXT

SEQ ID NO: 4635 - protein, 20 aa, synthetic construct
  REGION 1..20: note = GFR-binding peptide
  VARIANT 14..15: note = Xaa is C or S
FYLISIANLRTPVXXTPPTS

SEQ ID NO: 4636 - protein, 13 aa, synthetic construct
  REGION 1..13: note = GFR-binding peptide
FYLVSIANLKTPV

SEQ ID NO: 4637 - protein, 20 aa, synthetic construct
  REGION 1..20: note = GFR-binding peptide
  VARIANT 14..15: note = Xaa is C or S
FYLMSIANLETPVXXAKPIK

SEQ ID NO: 4638 - protein, 19 aa, synthetic construct
  REGION 1..19: note = GFR-binding peptide
  VARIANT 14..15: note = Xaa is C or S
FYLVSIANLKTPAXXAKPV

SEQ ID NO: 4639 - protein, 13 aa, synthetic construct
  REGION 1..13: note = GFR-binding peptide
FYLISIANLRTPV

SEQ ID NO: 4640 - protein, 15 aa, synthetic construct
  REGION 1..15: note = GFR-binding peptide
  VARIANT 14..15: note = Xaa is C or S
FYLVSIANLQTPAXX

SEQ ID NO: 4641 - protein, 19 aa, synthetic construct
  REGION 1..19: note = GFR-binding peptide
  VARIANT 14..15: note = Xaa is C or S
FYLMSIANLETPVXXAKPI

SEQ ID NO: 4642 - protein, 16 aa, synthetic construct
  REGION 1..16: note = GFR-binding peptide
  VARIANT 14..15: note = Xaa is C or S
FYLISIANLRAPVXXS

SEQ ID NO: 4643 - protein, 10 aa, synthetic construct
  REGION 1..10: note = GFR-binding peptide
FYLISIANLR

SEQ ID NO: 4644 - protein, 15 aa, synthetic construct
  REGION 1..15: note = GFR-binding peptide
  VARIANT 14..15: note = Xaa is C or S
FYLMSIANLETPVXX

SEQ ID NO: 4645 - protein, 20 aa, synthetic construct
  REGION 1..20: note = GFR-binding peptide
  VARIANT 14..15: note = Xaa is C or S
FYLMSIANLETPVXXAKPIS

SEQ ID NO: 4646 - protein, 10 aa, synthetic construct
  REGION 1..10: note = GFR-binding peptide
FYLVSIANLK

SEQ ID NO: 4647 - protein, 19 aa, synthetic construct
  REGION 1..19: note = GFR-binding peptide
  VARIANT 14..15: note = Xaa is C or S
FYLISIANLRAPVXXSAPA

SEQ ID NO: 4648 - protein, 13 aa, synthetic construct
  REGION 1..13: note = GFR-binding peptide
FYLISIANLKTPV

SEQ ID NO: 4649 - protein, 16 aa, synthetic construct
  REGION 1..16: note = GFR-binding peptide
  VARIANT 14..15: note = Xaa is C or S
FYLMSIANLETPVXXA

SEQ ID NO: 4650 - protein, 11 aa, synthetic construct
  REGION 1..11: note = GFR-binding peptide
FYLISIANLRA

SEQ ID NO: 4651 - protein, 18 aa, synthetic construct
  REGION 1..18: note = GFR-binding peptide
  VARIANT 14..15: note = Xaa is C or S
FYLVSIANLQTPAXXPKP

SEQ ID NO: 4652 - protein, 18 aa, synthetic construct
  REGION 1..18: note = GFR-binding peptide
  VARIANT 14..15: note = Xaa is C or S
FYLMSIANMKTPTXXPGA

SEQ ID NO: 4653 - protein, 15 aa, synthetic construct
  REGION 1..15: note = GFR-binding peptide
  VARIANT 14..15: note = Xaa is C or S
FYLISIANLKTPVXX

SEQ ID NO: 4654 - protein, 20 aa, synthetic construct
  REGION 1..20: note = GFR-binding peptide
  VARIANT 14..15: note = Xaa is C or S
FYLISIANLKTPVXXAKSAK

SEQ ID NO: 4655 - protein, 9 aa, synthetic construct
  REGION 1..9: note = GFR-binding peptide
FYLMSIANL

SEQ ID NO: 4656 - protein, 13 aa, synthetic construct
  REGION 1..13: note = GFR-binding peptide
FYLVSIANLQTPA

SEQ ID NO: 4657 - protein, 9 aa, synthetic construct
  REGION 1..9: note = GFR-binding peptide
FYLVSIANL

SEQ ID NO: 4658 - protein, 12 aa, synthetic construct
  REGION 1..12: note = GFR-binding peptide
FYLVSIANLQTP

SEQ ID NO: 4659 - protein, 13 aa, synthetic construct
  REGION 1..13: note = GFR-binding peptide
FYLISIANLRAPV

SEQ ID NO: 4660 - protein, 20 aa, synthetic construct
  REGION 1..20: note = GFR-binding peptide
  VARIANT 14..15: note = Xaa is C or S
FYLVSIANLKTPAXXPKPVH

SEQ ID NO: 4661 - protein, 13 aa, synthetic construct
  REGION 1..13: note = GFR-binding peptide
FYLMSIANLETPV

SEQ ID NO: 4662 - protein, 16 aa, synthetic construct
  REGION 1..16: note = GFR-binding peptide
  VARIANT 14..15: note = Xaa is C or S
FYLVSIANLKTPAXXA

SEQ ID NO: 4663 - protein, 16 aa, synthetic construct
  REGION 1..16: note = GFR-binding peptide
  VARIANT 14..15: note = Xaa is C or S
FYLISIANLKTPVXXA

SEQ ID NO: 4664 - protein, 19 aa, synthetic construct
  REGION 1..19: note = GFR-binding peptide
  VARIANT 14..15: note = Xaa is C or S
FYLMSIANMKTPTXXPGAS

SEQ ID NO: 4665 - protein, 18 aa, synthetic construct
  REGION 1..18: note = GFR-binding peptide
  VARIANT 14..15: note = Xaa is C or S
FYLISIANLKTPVXXAKS

SEQ ID NO: 4666 - protein, 20 aa, synthetic construct
  REGION 1..20: note = GFR-binding peptide
  VARIANT 14..15: note = Xaa is C or S
FYLMSIANMKTPTXXPGASG

SEQ ID NO: 4667 - protein, 15 aa, synthetic construct
  REGION 1..15: note = GFR-binding peptide
  VARIANT 14..15: note = Xaa is C or S
FYLVSIANLKTPVXX

SEQ ID NO: 4668 - protein, 10 aa, synthetic construct
  REGION 1..10: note = GFR-binding peptide
FYLMSIANMK

SEQ ID NO: 4669 - protein, 16 aa, synthetic construct
  REGION 1..16: note = GFR-binding peptide
  VARIANT 14: note = Xaa is C or S
FYLVSIANLKTPAXTP

SEQ ID NO: 4670 - protein, 15 aa, synthetic construct
  REGION 1..15: note = GFR-binding peptide
  VARIANT 14..15: note = Xaa is C or S
FYLISIANLRTPVXX

SEQ ID NO: 4671 - protein, 10 aa, synthetic construct
  REGION 1..10: note = GFR-binding peptide
FYLMSIANTK

SEQ ID NO: 4672 - protein, 11 aa, synthetic construct
  REGION 1..11: note = GFR-binding peptide
FYLISIANLRT

SEQ ID NO: 4673 - protein, 17 aa, synthetic construct
  REGION 1..17: note = GFR-binding peptide
  VARIANT 14..15: note = Xaa is C or S
FYLVSIANLQTPAXXPK

SEQ ID NO: 4674 - protein, 11 aa, synthetic construct
  REGION 1..11: note = GFR-binding peptide
FYLVSIANLKT

SEQ ID NO: 4675 - protein, 19 aa, synthetic construct
  REGION 1..19: note = GFR-binding peptide
  VARIANT 14..15: note = Xaa is C or S
FYLVSIANLQTPAXXPKPV

SEQ ID NO: 4676 - protein, 19 aa, synthetic construct
  REGION 1..19: note = GFR-binding peptide
  VARIANT 14..15: note = Xaa is C or S
FYLVSIANLKTPVXXAKGV

SEQ ID NO: 4677 - protein, 17 aa, synthetic construct
  REGION 1..17: note = GFR-binding peptide
  VARIANT 14..15: note = Xaa is C or S
FYLISIANLRAPVXXSA

SEQ ID NO: 4678 - protein, 14 aa, synthetic construct
  REGION 1..14: note = GFR-binding peptide
  VARIANT 14: note = Xaa is C or S
FYLISIANLRAPVX

SEQ ID NO: 4679 - protein, 14 aa, synthetic construct
  REGION 1..14: note = GFR-binding peptide
  VARIANT 14: note = Xaa is C or S
FYLMSIANLETPVX

SEQ ID NO: 4680 - protein, 16 aa, synthetic construct
  REGION 1..16: note = GFR-binding peptide
  VARIANT 14..15: note = Xaa is C or S
FYLVSIANLKTPVXXA

SEQ ID NO: 4681 - protein, 17 aa, synthetic construct
  REGION 1..17: note = GFR-binding peptide
  VARIANT 14..15: note = Xaa is C or S
FYLVSIANLKTPAXXPK

SEQ ID NO: 4682 - protein, 11 aa, synthetic construct
  REGION 1..11: note = GFR-binding peptide
FYLVSIANLQT

SEQ ID NO: 4683 - protein, 8 aa, synthetic construct
  REGION 1..8: note = GFR-binding peptide
FYLVSIAN

SEQ ID NO: 4684 - protein, 13 aa, synthetic construct
  REGION 1..13: note = GFR-binding peptide
FYLMSIANMKTPT

SEQ ID NO: 4685 - protein, 18 aa, synthetic construct
  REGION 1..18: note = GFR-binding peptide
  VARIANT 14..15: note = Xaa is C or S
FYLMSIANTKVPAXXTSP

SEQ ID NO: 4686 - protein, 16 aa, synthetic construct
  REGION 1..16: note = GFR-binding peptide
  VARIANT 14..15: note = Xaa is C or S
FYLVSIANLQTPAXXP

SEQ ID NO: 4687 - protein, 20 aa, synthetic construct
  REGION 1..20: note = GFR-binding peptide
  VARIANT 14..15: note = Xaa is C or S
FYLMSIANTKVPAXXTSPVR

SEQ ID NO: 4688 - protein, 19 aa, synthetic construct
  REGION 1..19: note = GFR-binding peptide
  VARIANT 14..15: note = Xaa is C or S
FYLVSIANLKTPAXXPKPV

SEQ ID NO: 4689 - protein, 20 aa, synthetic construct
  REGION 1..20: note = GFR-binding peptide
  VARIANT 14..15: note = Xaa is C or S
FYLVSIANLQTPAXXPKPVT

SEQ ID NO: 4690 - protein, 19 aa, synthetic construct
  REGION 1..19: note = GFR-binding peptide
  VARIANT 14..15: note = Xaa is C or S
FYLISIANLKTPVXXAKSA

SEQ ID NO: 4691 - protein, 18 aa, synthetic construct
  REGION 1..18: note = GFR-binding peptide
  VARIANT 14..15: note = Xaa is C or S
FYLISIANLRAPVXXSAP

SEQ ID NO: 4692 - protein, 14 aa, synthetic construct
  REGION 1..14: note = GFR-binding peptide
  VARIANT 14: note = Xaa is C or S
FYLVSIANLKTPVX

SEQ ID NO: 4693 - protein, 14 aa, synthetic construct
  REGION 1..14: note = GFR-binding peptide
  VARIANT 14: note = Xaa is C or S
FYLISIANLRTPVX

SEQ ID NO: 4694 - protein, 16 aa, synthetic construct
  REGION 1..16: note = GFR-binding peptide
  VARIANT 14..15: note = Xaa is C or S
FYLMSIANTKVPAXXT

SEQ ID NO: 4695 - protein, 12 aa, synthetic construct
  REGION 1..12: note = GFR-binding peptide
FYLISIANLKTP

SEQ ID NO: 4696 - protein, 14 aa, synthetic construct
  REGION 1..14: note = GFR-binding peptide
  VARIANT 14: note = Xaa is C or S
FYLMSIANTKVPAX

SEQ ID NO: 4697 - protein, 18 aa, synthetic construct
  REGION 1..18: note = GFR-binding peptide
  VARIANT 14..15: note = Xaa is C or S
FYLMSIANLETPVXXAKP

SEQ ID NO: 4698 - protein, 17 aa, synthetic construct
  REGION 1..17: note = GFR-binding peptide
  VARIANT 14: note = Xaa is C or S
FYLVSIANLKTPAXTPK

SEQ ID NO: 4699 - protein, 18 aa, synthetic construct
  REGION 1..18: note = GFR-binding peptide
  VARIANT 14: note = Xaa is C or S
FYLVSIANLKTPAXTPKT

SEQ ID NO: 4700 - protein, 12 aa, synthetic construct
  REGION 1..12: note = GFR-binding peptide
FYLMSIANTKVP

SEQ ID NO: 4701 - protein, 13 aa, synthetic construct
  REGION 1..13: note = GFR-binding peptide
FYLMSIANTKVPA

SEQ ID NO: 4702 - protein, 14 aa, synthetic construct
  REGION 1..14: note = GFR-binding peptide
  VARIANT 14: note = Xaa is C or S
FYLMSIANMKTPTX

SEQ ID NO: 4703 - protein, 15 aa, synthetic construct
  REGION 1..15: note = GFR-binding peptide
  VARIANT 14..15: note = Xaa is C or S
FYLVSIANLKTPAXX

SEQ ID NO: 4704 - protein, 19 aa, synthetic construct
  REGION 1..19: note = GFR-binding peptide
  VARIANT 14..15: note = Xaa is C or S
FYLMSIANTKVPAXXTSPV

SEQ ID NO: 4705 - protein, 17 aa, synthetic construct
  REGION 1..17: note = GFR-binding peptide
  VARIANT 14..15: note = Xaa is C or S
FYLISIANLKTPVXXAK

SEQ ID NO: 4706 - protein, 18 aa, synthetic construct
  REGION 1..18: note = GFR-binding peptide
  VARIANT 14..15: note = Xaa is C or S
FYLVSIANLKTPVXXAKG

SEQ ID NO: 4707 - protein, 17 aa, synthetic construct
  REGION 1..17: note = GFR-binding peptide
  VARIANT 14..15: note = Xaa is C or S
FYLISIANLRTPVXXTP

SEQ ID NO: 4708 - protein, 15 aa, synthetic construct
  REGION 1..15: note = GFR-binding peptide
  VARIANT 14..15: note = Xaa is C or S
FYLISIANLRAPVXX

SEQ ID NO: 4709 - protein, 11 aa, synthetic construct
  REGION 1..11: note = GFR-binding peptide
FYLMSIANTKV

SEQ ID NO: 4710 - protein, 17 aa, synthetic construct
  REGION 1..17: note = GFR-binding peptide
  VARIANT 14..15: note = Xaa is C or S
FYLMSIANLETPVXXAK

SEQ ID NO: 4711 - protein, 12 aa, synthetic construct
  REGION 1..12: note = GFR-binding peptide
FYLMSIANMKTP

SEQ ID NO: 4712 - protein, 12 aa, synthetic construct
  REGION 1..12: note = GFR-binding peptide
FYLISIANLRTP

SEQ ID NO: 4713 - protein, 11 aa, synthetic construct
  REGION 1..11: note = GFR-binding peptide
FYLISIANLKT

SEQ ID NO: 4714 - protein, 18 aa, synthetic construct
  REGION 1..18: note = GFR-binding peptide
  VARIANT 14..15: note = Xaa is C or S
FYLVSIANLKTPAXXPKP

SEQ ID NO: 4715 - protein, 12 aa, synthetic construct
  REGION 1..12: note = GFR-binding peptide
FYLVSIANLKTP

SEQ ID NO: 4716 - protein, 11 aa, synthetic construct
  REGION 1..11: note = GFR-binding peptide
FYLMSIANLET

SEQ ID NO: 4717 - protein, 17 aa, synthetic construct
  REGION 1..17: note = GFR-binding peptide
  VARIANT 14..15: note = Xaa is C or S
FYLMSIANTKVPAXXTS

SEQ ID NO: 4718 - protein, 9 aa, synthetic construct
  REGION 1..9: note = GFR-binding peptide
FYLISIANL

SEQ ID NO: 4719 - protein, 13 aa, synthetic construct
  REGION 1..13: note = GFR-binding peptide
VPQDLEPISILYL

SEQ ID NO: 4720 - protein, 13 aa, synthetic construct
  REGION 1..13: note = GFR-binding peptide
VPTRLSATSILYY

SEQ ID NO: 4721 - protein, 14 aa, synthetic construct
  REGION 1..14: note = GFR-binding peptide
  VARIANT 1: note = Xaa is C or S
XVPTKLNAISILYF

SEQ ID NO: 4722 - protein, 13 aa, synthetic construct
  REGION 1..13: note = GFR-binding peptide
VPTELEPISMLYL

SEQ ID NO: 4723 - protein, 19 aa, synthetic construct
  REGION 1..19: note = GFR-binding peptide
  VARIANT 5..6: note = Xaa is C or S
APASXXVPARLSPISILYK

SEQ ID NO: 4724 - protein, 14 aa, synthetic construct
  REGION 1..14: note = GFR-binding peptide
  VARIANT 1: note = Xaa is C or S
XVSQDLEPISILYL

SEQ ID NO: 4725 - protein, 11 aa, synthetic construct
  REGION 1..11: note = GFR-binding peptide
QDLNAISILYF

SEQ ID NO: 4726 - protein, 14 aa, synthetic construct
  REGION 1..14: note = GFR-binding peptide
  VARIANT 1: note = Xaa is C or S
XVPEKMSATSILYY

SEQ ID NO: 4727 - protein, 17 aa, synthetic construct
  REGION 1..17: note = GFR-binding peptide
  VARIANT 3..4: note = Xaa is C or S
KAXXAPTKLSPINVLYF

SEQ ID NO: 4728 - protein, 10 aa, synthetic construct
  REGION 1..10: note = GFR-binding peptide
QLSPINVLYF

SEQ ID NO: 4729 - protein, 15 aa, synthetic construct
  REGION 1..15: note = GFR-binding peptide
  VARIANT 1..2: note = Xaa is C or S
XXVPTELSPINMLYF

SEQ ID NO: 4730 - protein, 16 aa, synthetic construct
  REGION 1..16: note = GFR-binding peptide
  VARIANT 2..3: note = Xaa is C or S
TXXVPTRLSPINILYF

SEQ ID NO: 4731 - protein, 18 aa, synthetic construct
  REGION 1..18: note = GFR-binding peptide
  VARIANT 4..5: note = Xaa is C or S
PEPXXVPEKMSPINILYF

SEQ ID NO: 4732 - protein, 20 aa, synthetic construct
  REGION 1..20: note = GFR-binding peptide
  VARIANT 6..7: note = Xaa is C or S
GSAGPXXTPTKMSPISMLYK

SEQ ID NO: 4733 - protein, 16 aa, synthetic construct
  REGION 1..16: note = GFR-binding peptide
  VARIANT 3: note = Xaa is C or S
PTXAPTKLEPISVLYL

SEQ ID NO: 4734 - protein, 16 aa, synthetic construct
  REGION 1..16: note = GFR-binding peptide
  VARIANT 2..3: note = Xaa is C or S
PXXAPTQLSATSVLYY

SEQ ID NO: 4735 - protein, 10 aa, synthetic construct
  REGION 1..10: note = GFR-binding peptide
DLEPISILYL

SEQ ID NO: 4736 - protein, 11 aa, synthetic construct
  REGION 1..11: note = GFR-binding peptide
TKMSPISMLYK

SEQ ID NO: 4737 - protein, 16 aa, synthetic construct
  REGION 1..16: note = GFR-binding peptide
  VARIANT 2..3: note = Xaa is C or S
PXXVPQALSATSILYY

SEQ ID NO: 4738 - protein, 12 aa, synthetic construct
  REGION 1..12: note = GFR-binding peptide
PQALSPISILYK

SEQ ID NO: 4739 - protein, 14 aa, synthetic construct
  REGION 1..14: note = GFR-binding peptide
  VARIANT 1: note = Xaa is C or S
XVPTKLSPISILYK

SEQ ID NO: 4740 - protein, 11 aa, synthetic construct
  REGION 1..11: note = GFR-binding peptide
TKMNAISMLYF

SEQ ID NO: 4741 - protein, 20 aa, synthetic construct
  REGION 1..20: note = GFR-binding peptide
  VARIANT 6..7: note = Xaa is C or S
KVGKAXXVPTKLSPINVLYF

SEQ ID NO: 4742 - protein, 9 aa, synthetic construct
  REGION 1..9: note = GFR-binding peptide
MSPISILYK

SEQ ID NO: 4743 - protein, 18 aa, synthetic construct
  REGION 1..18: note = GFR-binding peptide
  VARIANT 4..5: note = Xaa is C or S
ASPXXVPQDLSATSILYY

SEQ ID NO: 4744 - protein, 18 aa, synthetic construct
  REGION 1..18: note = GFR-binding peptide
  VARIANT 4..5: note = Xaa is C or S
AAPXXVPQALSATSILYY

SEQ ID NO: 4745 - protein, 18 aa, synthetic construct
  REGION 1..18: note = GFR-binding peptide
  VARIANT 5: note = Xaa is C or S
TKPTXAPTKLSPINVLYF

SEQ ID NO: 4746 - protein, 18 aa, synthetic construct
  REGION 1..18: note = GFR-binding peptide
  VARIANT 4..5: note = Xaa is C or S
PKAXXAPTKLNAISVLYF

SEQ ID NO: 4747 - protein, 11 aa, synthetic construct
  REGION 1..11: note = GFR-binding peptide
TRLEPISILYL

SEQ ID NO: 4748 - protein, 19 aa, synthetic construct
  REGION 1..19: note = GFR-binding peptide
  VARIANT 5..6: note = Xaa is C or S
VPSTXXAPVKTSATSMLYY

SEQ ID NO: 4749 - protein, 12 aa, synthetic construct
  REGION 1..12: note = GFR-binding peptide
PVKTSPINMLYF

SEQ ID NO: 4750 - protein, 17 aa, synthetic construct
  REGION 1..17: note = GFR-binding peptide
  VARIANT 3..4: note = Xaa is C or S
SPXXVSQDLEPISILYL

SEQ ID NO: 4751 - protein, 16 aa, synthetic construct
  REGION 1..16: note = GFR-binding peptide
  VARIANT 2..3: note = Xaa is C or S
PXXVPEKMSPISILYK

SEQ ID NO: 4752 - protein, 17 aa, synthetic construct
  REGION 1..17: note = GFR-binding peptide
  VARIANT 3..4: note = Xaa is C or S
KPXXAPTQLSPINVLYF

SEQ ID NO: 4753 - protein, 16 aa, synthetic construct
  REGION 1..16: note = GFR-binding peptide
  VARIANT 2..3: note = Xaa is C or S
SXXVPARLNAISILYF

SEQ ID NO: 4754 - protein, 9 aa, synthetic construct
  REGION 1..9: note = GFR-binding peptide
LEPISVLYL

SEQ ID NO: 4755 - protein, 18 aa, synthetic construct
  REGION 1..18: note = GFR-binding peptide
  VARIANT 4..5: note = Xaa is C or S
PSTXXAPVKTSPINMLYF

SEQ ID NO: 4756 - protein, 19 aa, synthetic construct
  REGION 1..19: note = GFR-binding peptide
  VARIANT 5..6: note = Xaa is C or S
APASXXVPARLNAISILYF

SEQ ID NO: 4757 - protein, 12 aa, synthetic construct
  REGION 1..12: note = GFR-binding peptide
PTQLSPISVLYK

SEQ ID NO: 4758 - protein, 17 aa, synthetic construct
  REGION 1..17: note = GFR-binding peptide
  VARIANT 4: note = Xaa is C or S
KPTXAPTKLEPISVLYL

SEQ ID NO: 4759 - protein, 16 aa, synthetic construct
  REGION 1..16: note = GFR-binding peptide
  VARIANT 2..3: note = Xaa is C or S
SXXVPARLSPISILYK

SEQ ID NO: 4760 - protein, 15 aa, synthetic construct
  REGION 1..15: note = GFR-binding peptide
  VARIANT 1..2: note = Xaa is C or S
XXVPARLSATSILYY

SEQ ID NO: 4761 - protein, 12 aa, synthetic construct
  REGION 1..12: note = GFR-binding peptide
PTKMEPISMLYL

SEQ ID NO: 4762 - protein, 17 aa, synthetic construct
  REGION 1..17: note = GFR-binding peptide
  VARIANT 3..4: note = Xaa is C or S
KAXXAPTKLEPISVLYL

SEQ ID NO: 4763 - protein, 14 aa, synthetic construct
  REGION 1..14: note = GFR-binding peptide
  VARIANT 1: note = Xaa is C or S
XVPARLSATSILYY

SEQ ID NO: 4764 - protein, 14 aa, synthetic construct
  REGION 1..14: note = GFR-binding peptide
  VARIANT 1: note = Xaa is C or S
XVPQDLSPINILYF

SEQ ID NO: 4765 - protein, 20 aa, synthetic construct
  REGION 1..20: note = GFR-binding peptide
  VARIANT 6..7: note = Xaa is C or S
GSAGPXXTPTKMNAISMLYF

SEQ ID NO: 4766 - protein, 9 aa, synthetic construct
  REGION 1..9: note = GFR-binding peptide
LSPINVLYF

SEQ ID NO: 4767 - protein, 15 aa, synthetic construct
  REGION 1..15: note = GFR-binding peptide
  VARIANT 1..2: note = Xaa is C or S
XXVPTELEPISMLYL

SEQ ID NO: 4768 - protein, 16 aa, synthetic construct
  REGION 1..16: note = GFR-binding peptide
  VARIANT 3: note = Xaa is C or S
PTXAPTKLSPINVLYF

SEQ ID NO: 4769 - protein, 17 aa, synthetic construct
  REGION 1..17: note = GFR-binding peptide
  VARIANT 3..4: note = Xaa is C or S
APXXVPQALSPINILYF

SEQ ID NO: 4770 - protein, 15 aa, synthetic construct
  REGION 1..15: note = GFR-binding peptide
  VARIANT 1..2: note = Xaa is C or S
XXVPQDLEPISILYL

SEQ ID NO: 4771 - protein, 9 aa, synthetic construct
  REGION 1..9: note = GFR-binding peptide
MNAISILYF

SEQ ID NO: 4772 - protein, 14 aa, synthetic construct
  REGION 1..14: note = GFR-binding peptide
  VARIANT 1: note = Xaa is C or S
XAPTQLEPISVLYL

SEQ ID NO: 4773 - protein, 17 aa, synthetic construct
  REGION 1..17: note = GFR-binding peptide
  VARIANT 3..4: note = Xaa is C or S
GPXXTPTKMSATSMLYY

SEQ ID NO: 4774 - protein, 11 aa, synthetic construct
  REGION 1..11: note = GFR-binding peptide
QDLSPISILYK

SEQ ID NO: 4775 - protein, 19 aa, synthetic construct
  REGION 1..19: note = GFR-binding peptide
  VARIANT 5..6: note = Xaa is C or S
SAAPXXVPQALEPISILYL

SEQ ID NO: 4776 - protein, 18 aa, synthetic construct
  REGION 1..18: note = GFR-binding peptide
  VARIANT 4..5: note = Xaa is C or S
PASXXVPARLSPINILYF

SEQ ID NO: 4777 - protein, 17 aa, synthetic construct
  REGION 1..17: note = GFR-binding peptide
  VARIANT 3..4: note = Xaa is C or S
SPXXVPQDLSPINILYF

SEQ ID NO: 4778 - protein, 15 aa, synthetic construct
  REGION 1..15: note = GFR-binding peptide
  VARIANT 1..2: note = Xaa is C or S
XXTPTKMEPISMLYL

SEQ ID NO: 4779 - protein, 13 aa, synthetic construct
  REGION 1..13: note = GFR-binding peptide
TPTKMEPISMLYL

SEQ ID NO: 4780 - protein, 15 aa, synthetic construct
  REGION 1..15: note = GFR-binding peptide
  VARIANT 2: note = Xaa is C or S
TXAPTKLSATSVLYY

SEQ ID NO: 4781 - protein, 11 aa, synthetic construct
  REGION 1..11: note = GFR-binding peptide
TELSPISMLYK

SEQ ID NO: 4782 - protein, 16 aa, synthetic construct
  REGION 1..16: note = GFR-binding peptide
  VARIANT 2..3: note = Xaa is C or S
PXXAPTKLEPISVLYL

SEQ ID NO: 4783 - protein, 11 aa, synthetic construct
  REGION 1..11: note = GFR-binding peptide
TKLSPINVLYF

SEQ ID NO: 4784 - protein, 20 aa, synthetic construct
  REGION 1..20: note = GFR-binding peptide
  VARIANT 6..7: note = Xaa is C or S
SIPKAXXVPTELSATSMLYY

SEQ ID NO: 4785 - protein, 17 aa, synthetic construct
  REGION 1..17: note = GFR-binding peptide
  VARIANT 3..4: note = Xaa is C or S
KAXXVPTELNAISMLYF

SEQ ID NO: 4786 - protein, 9 aa, synthetic construct
  REGION 1..9: note = GFR-binding peptide
LEPISMLYL

SEQ ID NO: 4787 - protein, 19 aa, synthetic construct
  REGION 1..19: note = GFR-binding peptide
  VARIANT 5..6: note = Xaa is C or S
SASPXXVPQDLEPISILYL

SEQ ID NO: 4788 - protein, 20 aa, synthetic construct
  REGION 1..20: note = GFR-binding peptide
  VARIANT 6..7: note = Xaa is C or S
KVGKAXXVPTKLEPISVLYL

SEQ ID NO: 4789 - protein, 11 aa, synthetic construct
  REGION 1..11: note = GFR-binding peptide
TELNAISMLYF

SEQ ID NO: 4790 - protein, 17 aa, synthetic construct
  REGION 1..17: note = GFR-binding peptide
  VARIANT 3..4: note = Xaa is C or S
KAXXVPTKLSPINVLYF

SEQ ID NO: 4791 - protein, 17 aa, synthetic construct
  REGION 1..17: note = GFR-binding peptide
  VARIANT 3..4: note = Xaa is C or S
KAXXVPTELSPISMLYK

SEQ ID NO: 4792 - protein, 17 aa, synthetic construct
  REGION 1..17: note = GFR-binding peptide
  VARIANT 3..4: note = Xaa is C or S
APXXVPQALEPISILYL

SEQ ID NO: 4793 - protein, 16 aa, synthetic construct
  REGION 1..16: note = GFR-binding peptide
  VARIANT 2..3: note = Xaa is C or S
AXXVPTELSPINMLYF

SEQ ID NO: 4794 - protein, 15 aa, synthetic construct
  REGION 1..15: note = GFR-binding peptide
  VARIANT 1..2: note = Xaa is C or S
XXAPVKTSATSMLYY

SEQ ID NO: 4795 - protein, 19 aa, synthetic construct
  REGION 1..19: note = GFR-binding peptide
  VARIANT 5..6: note = Xaa is C or S
SASPXXVPQDLSPINILYF

SEQ ID NO: 4796 - protein, 20 aa, synthetic construct
  REGION 1..20: note = GFR-binding peptide
  VARIANT 6..7: note = Xaa is C or S
GIPEPXXVPEKMSATSILYY

SEQ ID NO: 4797 - protein, 10 aa, synthetic construct
  REGION 1..10: note = GFR-binding peptide
KTEPISMLYL

SEQ ID NO: 4798 - protein, 14 aa, synthetic construct
  REGION 1..14: note = GFR-binding peptide
  VARIANT 1: note = Xaa is C or S
XVPQALSPINILYF

SEQ ID NO: 4799 - protein, 10 aa, synthetic construct
  REGION 1..10: note = GFR-binding peptide
KTSPISMLYK

SEQ ID NO: 4800 - protein, 17 aa, synthetic construct
  REGION 1..17: note = GFR-binding peptide
  VARIANT 3..4: note = Xaa is C or S
PTXXVPTRLSATSILYY

SEQ ID NO: 4801 - protein, 18 aa, synthetic construct
  REGION 1..18: note = GFR-binding peptide
  VARIANT 4..5: note = Xaa is C or S
PSTXXAPVKTEPISMLYL

SEQ ID NO: 4802 - protein, 20 aa, synthetic construct
  REGION 1..20: note = GFR-binding peptide
  VARIANT 6..7: note = Xaa is C or S
TVPKPXXAPTQLEPISVLYL

SEQ ID NO: 4803 - protein, 20 aa, synthetic construct
  REGION 1..20: note = GFR-binding peptide
  VARIANT 6..7: note = Xaa is C or S
AAPASXXVPARLSATSILYY

SEQ ID NO: 4804 - protein, 11 aa, synthetic construct
  REGION 1..11: note = GFR-binding peptide
ARLSPINILYF

SEQ ID NO: 4805 - protein, 19 aa, synthetic construct
  REGION 1..19: note = GFR-binding peptide
  VARIANT 5..6: note = Xaa is C or S
VPKPXXAPTQLEPISVLYL

SEQ ID NO: 4806 - protein, 9 aa, synthetic construct
  REGION 1..9: note = GFR-binding peptide
MNAISMLYF

SEQ ID NO: 4807 - protein, 16 aa, synthetic construct
  REGION 1..16: note = GFR-binding peptide
  VARIANT 2..3: note = Xaa is C or S
TXXAPVKTSPINMLYF

SEQ ID NO: 4808 - protein, 19 aa, synthetic construct
  REGION 1..19: note = GFR-binding peptide
  VARIANT 5..6: note = Xaa is C or S
SASPXXVSQDLSPISILYK

SEQ ID NO: 4809 - protein, 18 aa, synthetic construct
  REGION 1..18: note = GFR-binding peptide
  VARIANT 4..5: note = Xaa is C or S
ASPXXVSQDLSPINILYF

SEQ ID NO: 4810 - protein, 18 aa, synthetic construct
  REGION 1..18: note = GFR-binding peptide
  VARIANT 4..5: note = Xaa is C or S
PPTXXVPTRLSPISILYK

SEQ ID NO: 4811 - protein, 12 aa, synthetic construct
  REGION 1..12: note = GFR-binding peptide
PVKTEPISMLYL

SEQ ID NO: 4812 - protein, 16 aa, synthetic construct
  REGION 1..16: note = GFR-binding peptide
  VARIANT 2..3: note = Xaa is C or S
PXXAPTKLSPINVLYF

SEQ ID NO: 4813 - protein, 19 aa, synthetic construct
  REGION 1..19: note = GFR-binding peptide
  VARIANT 5..6: note = Xaa is C or S
VPKAXXAPTKLSPINVLYF

SEQ ID NO: 4814 - protein, 16 aa, synthetic construct
  REGION 1..16: note = GFR-binding peptide
  VARIANT 2..3: note = Xaa is C or S
PXXTPTKMSPISMLYK

SEQ ID NO: 4815 - protein, 11 aa, synthetic construct
  REGION 1..11: note = GFR-binding peptide
QALSATSILYY

SEQ ID NO: 4816 - protein, 20 aa, synthetic construct
  REGION 1..20: note = GFR-binding peptide
  VARIANT 6..7: note = Xaa is C or S
KIPKAXXVPTELNAISMLYF

SEQ ID NO: 4817 - protein, 11 aa, synthetic construct
  REGION 1..11: note = GFR-binding peptide
TKLEPISVLYL

SEQ ID NO: 4818 - protein, 12 aa, synthetic construct
  REGION 1..12: note = GFR-binding peptide
PQDLSPINILYF

SEQ ID NO: 4819 - protein, 14 aa, synthetic construct
  REGION 1..14: note = GFR-binding peptide
  VARIANT 1: note = Xaa is C or S
XVPTRLSATSILYY

SEQ ID NO: 4820 - protein, 13 aa, synthetic construct
  REGION 1..13: note = GFR-binding peptide
APVKTSATSMLYY

SEQ ID NO: 4821 - protein, 12 aa, synthetic construct
  REGION 1..12: note = GFR-binding peptide
PTRLSATSILYY

SEQ ID NO: 4822 - protein, 10 aa, synthetic construct
  REGION 1..10: note = GFR-binding peptide
RLNAISILYF

SEQ ID NO: 4823 - protein, 12 aa, synthetic construct
  REGION 1..12: note = GFR-binding peptide
SQDLNAISILYF

SEQ ID NO: 4824 - protein, 10 aa, synthetic construct
  REGION 1..10: note = GFR-binding peptide
ALNAISILYF

SEQ ID NO: 4825 - protein, 13 aa, synthetic construct
  REGION 1..13: note = GFR-binding peptide
VPTKLNAISILYF

SEQ ID NO: 4826 - protein, 14 aa, synthetic construct
  REGION 1..14: note = GFR-binding peptide
  VARIANT 1: note = Xaa is C or S
XTPTKMEPISMLYL

SEQ ID NO: 4827 - protein, 18 aa, synthetic construct
  REGION 1..18: note = GFR-binding peptide
  VARIANT 4..5: note = Xaa is C or S
AGPXXTPTKMNAISMLYF

SEQ ID NO: 4828 - protein, 15 aa, synthetic construct
  REGION 1..15: note = GFR-binding peptide
  VARIANT 1..2: note = Xaa is C or S
XXVPTKLNAISILYF

SEQ ID NO: 4829 - protein, 15 aa, synthetic construct
  REGION 1..15: note = GFR-binding peptide
  VARIANT 1..2: note = Xaa is C or S
XXVPQALNAISILYF

SEQ ID NO: 4830 - protein, 13 aa, synthetic construct
  REGION 1..13: note = GFR-binding peptide
VPQALNAISILYF

SEQ ID NO: 4831 - protein, 18 aa, synthetic construct
  REGION 1..18: note = GFR-binding peptide
  VARIANT 4..5: note = Xaa is C or S
PKPXXAPTKLSPINVLYF

SEQ ID NO: 4832 - protein, 12 aa, synthetic construct
  REGION 1..12: note = GFR-binding peptide
PTELSPISMLYK

SEQ ID NO: 4833 - protein, 14 aa, synthetic construct
  REGION 1..14: note = GFR-binding peptide
  VARIANT 1: note = Xaa is C or S
XVPTELSATSMLYY

SEQ ID NO: 4834 - protein, 9 aa, synthetic construct
  REGION 1..9: note = GFR-binding peptide
LSPISMLYK

SEQ ID NO: 4835 - protein, 16 aa, synthetic construct
  REGION 1..16: note = GFR-binding peptide
  VARIANT 2..3: note = Xaa is C or S
PXXVPQDLSATSILYY

SEQ ID NO: 4836 - protein, 10 aa, synthetic construct
  REGION 1..10: note = GFR-binding peptide
KLSPISILYK

SEQ ID NO: 4837 - protein, 18 aa, synthetic construct
  REGION 1..18: note = GFR-binding peptide
  VARIANT 4..5: note = Xaa is C or S
SKAXXVPTKLSATSILYY

SEQ ID NO: 4838 - protein, 11 aa, synthetic construct
  REGION 1..11: note = GFR-binding peptide
ARLEPISILYL

SEQ ID NO: 4839 - protein, 18 aa, synthetic construct
  REGION 1..18: note = GFR-binding peptide
  VARIANT 4..5: note = Xaa is C or S
GKAXXVPTKLSATSVLYY

SEQ ID NO: 4840 - protein, 16 aa, synthetic construct
  REGION 1..16: note = GFR-binding peptide
  VARIANT 2..3: note = Xaa is C or S
PXXVPEKMNAISILYF

SEQ ID NO: 4841 - protein, 16 aa, synthetic construct
  REGION 1..16: note = GFR-binding peptide
  VARIANT 2..3: note = Xaa is C or S
PXXVSQDLSATSILYY

SEQ ID NO: 4842 - protein, 20 aa, synthetic construct
  REGION 1..20: note = GFR-binding peptide
  VARIANT 6..7: note = Xaa is C or S
STPPTXXVPTRLSPISILYK

SEQ ID NO: 4843 - protein, 20 aa, synthetic construct
  REGION 1..20: note = GFR-binding peptide
  VARIANT 6..7: note = Xaa is C or S
ASASPXXVPQDLSPISILYK

SEQ ID NO: 4844 - protein, 15 aa, synthetic construct
  REGION 1..15: note = GFR-binding peptide
  VARIANT 1..2: note = Xaa is C or S
XXVPTRLSATSILYY

SEQ ID NO: 4845 - protein, 14 aa, synthetic construct
  REGION 1..14: note = GFR-binding peptide
  VARIANT 1: note = Xaa is C or S
XVSQDLSPINILYF

SEQ ID NO: 4846 - protein, 17 aa, synthetic construct
  REGION 1..17: note = GFR-binding peptide
  VARIANT 3..4: note = Xaa is C or S
KAXXVPTKLEPISVLYL

SEQ ID NO: 4847 - protein, 19 aa, synthetic construct
  REGION 1..19: note = GFR-binding peptide
  VARIANT 5..6: note = Xaa is C or S
VGKAXXVPTKLNAISVLYF

SEQ ID NO: 4848 - protein, 14 aa, synthetic construct
  REGION 1..14: note = GFR-binding peptide
  VARIANT 1: note = Xaa is C or S
XVPQALEPISILYL

SEQ ID NO: 4849 - protein, 10 aa, synthetic construct
  REGION 1..10: note = GFR-binding peptide
KMSATSMLYY

SEQ ID NO: 4850 - protein, 17 aa, synthetic construct
  REGION 1..17: note = GFR-binding peptide
  VARIANT 3..4: note = Xaa is C or S
EPXXVPEKMNAISILYF

SEQ ID NO: 4851 - protein, 11 aa, synthetic construct
  REGION 1..11: note = GFR-binding peptide
TKLSPINILYF

SEQ ID NO: 4852 - protein, 9 aa, synthetic construct
  REGION 1..9: note = GFR-binding peptide
LSPINILYF

SEQ ID NO: 4853 - protein, 14 aa, synthetic construct
  REGION 1..14: note = GFR-binding peptide
  VARIANT 1: note = Xaa is C or S
XAPVKTSATSMLYY

SEQ ID NO: 4854 - protein, 18 aa, synthetic construct
  REGION 1..18: note = GFR-binding peptide
  VARIANT 5: note = Xaa is C or S
TKPTXAPTKLEPISVLYL

SEQ ID NO: 4855 - protein, 16 aa, synthetic construct
  REGION 1..16: note = GFR-binding peptide
  VARIANT 2..3: note = Xaa is C or S
TXXAPVKTEPISMLYL

SEQ ID NO: 4856 - protein, 20 aa, synthetic construct
  REGION 1..20: note = GFR-binding peptide
  VARIANT 6..7: note = Xaa is C or S
ASAAPXXVPQALNAISILYF

SEQ ID NO: 4857 - protein, 15 aa, synthetic construct
  REGION 1..15: note = GFR-binding peptide
  VARIANT 1..2: note = Xaa is C or S
XXVPQDLSPINILYF

SEQ ID NO: 4858 - protein, 19 aa, synthetic construct
  REGION 1..19: note = GFR-binding peptide
  VARIANT 5..6: note = Xaa is C or S
IPEPXXVPEKMSPISILYK

SEQ ID NO: 4859 - protein, 17 aa, synthetic construct
  REGION 1..17: note = GFR-binding peptide
  VARIANT 3..4: note = Xaa is C or S
KPXXAPTQLEPISVLYL

SEQ ID NO: 4860 - protein, 16 aa, synthetic construct
  REGION 1..16: note = GFR-binding peptide
  VARIANT 2..3: note = Xaa is C or S
TXXAPVKTNAISMLYF

SEQ ID NO: 4861 - protein, 12 aa, synthetic construct
  REGION 1..12: note = GFR-binding peptide
PQDLEPISILYL

SEQ ID NO: 4862 - protein, 19 aa, synthetic construct
  REGION 1..19: note = GFR-binding peptide
  VARIANT 5..6: note = Xaa is C or S
TPPTXXVPTRLSATSILYY

SEQ ID NO: 4863 - protein, 20 aa, synthetic construct
  REGION 1..20: note = GFR-binding peptide
  VARIANT 6..7: note = Xaa is C or S
RVPSTXXAPVKTSATSMLYY

SEQ ID NO: 4864 - protein, 12 aa, synthetic construct
  REGION 1..12: note = GFR-binding peptide
PQALNAISILYF

SEQ ID NO: 4865 - protein, 11 aa, synthetic construct
  REGION 1..11: note = GFR-binding peptide
EKMEPISILYL

SEQ ID NO: 4866 - protein, 17 aa, synthetic construct
  REGION 1..17: note = GFR-binding peptide
  VARIANT 3..4: note = Xaa is C or S
KAXXVPTKLSPINILYF

SEQ ID NO: 4867 - protein, 17 aa, synthetic construct
  REGION 1..17: note = GFR-binding peptide
  VARIANT 3..4: note = Xaa is C or S
ASXXVPARLSATSILYY

SEQ ID NO: 4868 - protein, 18 aa, synthetic construct
  REGION 1..18: note = GFR-binding peptide
  VARIANT 4..5: note = Xaa is C or S
PEPXXVPEKMEPISILYL

SEQ ID NO: 4869 - protein, 16 aa, synthetic construct
  REGION 1..16: note = GFR-binding peptide
  VARIANT 2..3: note = Xaa is C or S
AXXVPTELEPISMLYL

SEQ ID NO: 4870 - protein, 9 aa, synthetic construct
  REGION 1..9: note = GFR-binding peptide
TSPINMLYF

SEQ ID NO: 4871 - protein, 10 aa, synthetic construct
  REGION 1..10: note = GFR-binding peptide
ELSATSMLYY

SEQ ID NO: 4872 - protein, 13 aa, synthetic construct
  REGION 1..13: note = GFR-binding peptide
APTQLEPISVLYL

SEQ ID NO: 4873 - protein, 14 aa, synthetic construct
  REGION 1..14: note = GFR-binding peptide
  VARIANT 1: note = Xaa is C or S
XVPQDLEPISILYL

SEQ ID NO: 4874 - protein, 19 aa, synthetic construct
  REGION 1..19: note = GFR-binding peptide
  VARIANT 5..6: note = Xaa is C or S
VPKAXXAPTKLEPISVLYL

SEQ ID NO: 4875 - protein, 15 aa, synthetic construct
  REGION 1..15: note = GFR-binding peptide
  VARIANT 1..2: note = Xaa is C or S
XXAPTQLEPISVLYL

SEQ ID NO: 4876 - protein, 16 aa, synthetic construct
  REGION 1..16: note = GFR-binding peptide
  VARIANT 2..3: note = Xaa is C or S
PXXTPTKMSATSMLYY

SEQ ID NO: 4877 - protein, 16 aa, synthetic construct
  REGION 1..16: note = GFR-binding peptide
  VARIANT 2..3: note = Xaa is C or S
TXXVPTRLEPISILYL

SEQ ID NO: 4878 - protein, 13 aa, synthetic construct
  REGION 1..13: note = GFR-binding peptide
VPQDLSPINILYF

SEQ ID NO: 4879 - protein, 10 aa, synthetic construct
  REGION 1..10: note = GFR-binding peptide
DLSPINILYF

SEQ ID NO: 4880 - protein, 12 aa, synthetic construct
  REGION 1..12: note = GFR-binding peptide
PTKMSPISMLYK

SEQ ID NO: 4881 - protein, 17 aa, synthetic construct
  REGION 1..17: note = GFR-binding peptide
  VARIANT 3..4: note = Xaa is C or S
STXXAPVKTNAISMLYF

SEQ ID NO: 4882 - protein, 10 aa, synthetic construct
  REGION 1..10: note = GFR-binding peptide
KMNAISILYF

SEQ ID NO: 4883 - protein, 17 aa, synthetic construct
  REGION 1..17: note = GFR-binding peptide
  VARIANT 3..4: note = Xaa is C or S
KAXXVPTKLSATSVLYY

SEQ ID NO: 4884 - protein, 19 aa, synthetic construct
  REGION 1..19: note = GFR-binding peptide
  VARIANT 5..6: note = Xaa is C or S
SASPXXVSQDLSPINILYF

SEQ ID NO: 4885 - protein, 12 aa, synthetic construct
  REGION 1..12: note = GFR-binding peptide
PTRLEPISILYL

SEQ ID NO: 4886 - protein, 20 aa, synthetic construct
  REGION 1..20: note = GFR-binding peptide
  VARIANT 6..7: note = Xaa is C or S
KASKAXXVPTKLSPISILYK

SEQ ID NO: 4887 - protein, 14 aa, synthetic construct
  REGION 1..14: note = GFR-binding peptide
  VARIANT 1: note = Xaa is C or S
XVPTRLSPISILYK

SEQ ID NO: 4888 - protein, 15 aa, synthetic construct
  REGION 1..15: note = GFR-binding peptide
  VARIANT 1..2: note = Xaa is C or S
XXAPTKLSPISVLYK

SEQ ID NO: 4889 - protein, 13 aa, synthetic construct
  REGION 1..13: note = GFR-binding peptide
VPARLEPISILYL

SEQ ID NO: 4890 - protein, 15 aa, synthetic construct
  REGION 1..15: note = GFR-binding peptide
  VARIANT 1..2: note = Xaa is C or S
XXVPEKMEPISILYL

SEQ ID NO: 4891 - protein, 20 aa, synthetic construct
  REGION 1..20: note = GFR-binding peptide
  VARIANT 6..7: note = Xaa is C or S
GIPEPXXVPEKMNAISILYF

SEQ ID NO: 4892 - protein, 19 aa, synthetic construct
  REGION 1..19: note = GFR-binding peptide
  VARIANT 5..6: note = Xaa is C or S
APASXXVPARLEPISILYL

SEQ ID NO: 4893 - protein, 16 aa, synthetic construct
  REGION 1..16: note = GFR-binding peptide
  VARIANT 2..3: note = Xaa is C or S
PXXAPTKLSPISVLYK

SEQ ID NO: 4894 - protein, 17 aa, synthetic construct
  REGION 1..17: note = GFR-binding peptide
  VARIANT 3..4: note = Xaa is C or S
EPXXVPEKMSPISILYK

SEQ ID NO: 4895 - protein, 19 aa, synthetic construct
  REGION 1..19: note = GFR-binding peptide
  VARIANT 5..6: note = Xaa is C or S
SAAPXXVPQALSPISILYK

SEQ ID NO: 4896 - protein, 18 aa, synthetic construct
  REGION 1..18: note = GFR-binding peptide
  VARIANT 4..5: note = Xaa is C or S
PKAXXVPTELEPISMLYL

SEQ ID NO: 4897 - protein, 9 aa, synthetic construct
  REGION 1..9: note = GFR-binding peptide
MEPISILYL

SEQ ID NO: 4898 - protein, 16 aa, synthetic construct
  REGION 1..16: note = GFR-binding peptide
  VARIANT 2..3: note = Xaa is C or S
TXXVPTRLSATSILYY

SEQ ID NO: 4899 - protein, 19 aa, synthetic construct
  REGION 1..19: note = GFR-binding peptide
  VARIANT 5..6: note = Xaa is C or S
SAAPXXVPQALNAISILYF

SEQ ID NO: 4900 - protein, 13 aa, synthetic construct
  REGION 1..13: note = GFR-binding peptide
VPQDLSPISILYK

SEQ ID NO: 4901 - protein, 10 aa, synthetic construct
  REGION 1..10: note = GFR-binding peptide
QLSATSVLYY

SEQ ID NO: 4902 - protein, 14 aa, synthetic construct
  REGION 1..14: note = GFR-binding peptide
  VARIANT 1: note = Xaa is C or S
XAPTQLSPISVLYK

SEQ ID NO: 4903 - protein, 10 aa, synthetic construct
  REGION 1..10: note = GFR-binding peptide
ALSPINILYF

SEQ ID NO: 4904 - protein, 13 aa, synthetic construct
  REGION 1..13: note = GFR-binding peptide
VPQALSPINILYF

SEQ ID NO: 4905 - protein, 13 aa, synthetic construct
  REGION 1..13: note = GFR-binding peptide
APTQLSPINVLYF

SEQ ID NO: 4906 - protein, 9 aa, synthetic construct
  REGION 1..9: note = GFR-binding peptide
LSATSILYY

SEQ ID NO: 4907 - protein, 17 aa, synthetic construct
  REGION 1..17: note = GFR-binding peptide
  VARIANT 3..4: note = Xaa is C or S
KAXXVPTELSATSMLYY

SEQ ID NO: 4908 - protein, 15 aa, synthetic construct
  REGION 1..15: note = GFR-binding peptide
  VARIANT 1..2: note = Xaa is C or S
XXVPARLSPINILYF

SEQ ID NO: 4909 - protein, 12 aa, synthetic construct
  REGION 1..12: note = GFR-binding peptide
PQDLNAISILYF

SEQ ID NO: 4910 - protein, 11 aa, synthetic construct
  REGION 1..11: note = GFR-binding peptide
EKMNAISILYF

SEQ ID NO: 4911 - protein, 19 aa, synthetic construct
  REGION 1..19: note = GFR-binding peptide
  VARIANT 5..6: note = Xaa is C or S
IPKAXXVPTELNAISMLYF

SEQ ID NO: 4912 - protein, 18 aa, synthetic construct
  REGION 1..18: note = GFR-binding peptide
  VARIANT 4..5: note = Xaa is C or S
PKPXXAPTKLEPISVLYL

SEQ ID NO: 4913 - protein, 12 aa, synthetic construct
  REGION 1..12: note = GFR-binding peptide
PVKTSATSMLYY

SEQ ID NO: 4914 - protein, 14 aa, synthetic construct
  REGION 1..14: note = GFR-binding peptide
  VARIANT 1: note = Xaa is C or S
XVPTKLSATSVLYY

SEQ ID NO: 4915 - protein, 20 aa, synthetic construct
  REGION 1..20: note = GFR-binding peptide
  VARIANT 6..7: note = Xaa is C or S
SIPKAXXVPTELSPISMLYK

SEQ ID NO: 4916 - protein, 20 aa, synthetic construct
  REGION 1..20: note = GFR-binding peptide
  VARIANT 6..7: note = Xaa is C or S
SIPKAXXVPTELNAISMLYF

SEQ ID NO: 4917 - protein, 18 aa, synthetic construct
  REGION 1..18: note = GFR-binding peptide
  VARIANT 4..5: note = Xaa is C or S
GKAXXVPTKLEPISVLYL

SEQ ID NO: 4918 - protein, 17 aa, synthetic construct
  REGION 1..17: note = GFR-binding peptide
  VARIANT 3..4: note = Xaa is C or S
PTXXVPTRLEPISILYL

SEQ ID NO: 4919 - protein, 19 aa, synthetic construct
  REGION 1..19: note = GFR-binding peptide
  VARIANT 5..6: note = Xaa is C or S
SASPXXVPQDLSPISILYK

SEQ ID NO: 4920 - protein, 20 aa, synthetic construct
  REGION 1..20: note = GFR-binding peptide
  VARIANT 6..7: note = Xaa is C or S
KASKAXXVPTKLNAISILYF

SEQ ID NO: 4921 - protein, 9 aa, synthetic construct
  REGION 1..9: note = GFR-binding peptide
LNAISMLYF

SEQ ID NO: 4922 - protein, 9 aa, synthetic construct
  REGION 1..9: note = GFR-binding peptide
TEPISMLYL

SEQ ID NO: 4923 - protein, 10 aa, synthetic construct
  REGION 1..10: note = GFR-binding peptide
DLSATSILYY

SEQ ID NO: 4924 - protein, 16 aa, synthetic construct
  REGION 1..16: note = GFR-binding peptide
  VARIANT 2..3: note = Xaa is C or S
AXXAPTKLNAISVLYF

SEQ ID NO: 4925 - protein, 16 aa, synthetic construct
  REGION 1..16: note = GFR-binding peptide
  VARIANT 2..3: note = Xaa is C or S
AXXVPTKLNAISILYF

SEQ ID NO: 4926 - protein, 16 aa, synthetic construct
  REGION 1..16: note = GFR-binding peptide
  VARIANT 3: note = Xaa is C or S
PTXAPTKLSATSVLYY

SEQ ID NO: 4927 - protein, 11 aa, synthetic construct
  REGION 1..11: note = GFR-binding peptide
TQLSATSVLYY

SEQ ID NO: 4928 - protein, 11 aa, synthetic construct
  REGION 1..11: note = GFR-binding peptide
TELEPISMLYL

SEQ ID NO: 4929 - protein, 13 aa, synthetic construct
  REGION 1..13: note = GFR-binding peptide
TPTKMSPISMLYK

SEQ ID NO: 4930 - protein, 15 aa, synthetic construct
  REGION 1..15: note = GFR-binding peptide
  VARIANT 1..2: note = Xaa is C or S
XXVPTRLSPINILYF

SEQ ID NO: 4931 - protein, 15 aa, synthetic construct
  REGION 1..15: note = GFR-binding peptide
  VARIANT 1..2: note = Xaa is C or S
XXVPTKLNAISVLYF

SEQ ID NO: 4932 - protein, 19 aa, synthetic construct
  REGION 1..19: note = GFR-binding peptide
  VARIANT 5..6: note = Xaa is C or S
VGKAXXVPTKLSATSVLYY

SEQ ID NO: 4933 - protein, 10 aa, synthetic construct
  REGION 1..10: note = GFR-binding peptide
KTNAISMLYF

SEQ ID NO: 4934 - protein, 12 aa, synthetic construct
  REGION 1..12: note = GFR-binding peptide
PARLEPISILYL

SEQ ID NO: 4935 - protein, 11 aa, synthetic construct
  REGION 1..11: note = GFR-binding peptide
TQLSPISVLYK

SEQ ID NO: 4936 - protein, 13 aa, synthetic construct
  REGION 1..13: note = GFR-binding peptide
TPTKMSATSMLYY

SEQ ID NO: 4937 - protein, 17 aa, synthetic construct
  REGION 1..17: note = GFR-binding peptide
  VARIANT 3..4: note = Xaa is C or S
ASXXVPARLNAISILYF

SEQ ID NO: 4938 - protein, 20 aa, synthetic construct
  REGION 1..20: note = GFR-binding peptide
  VARIANT 6..7: note = Xaa is C or S
ASASPXXVPQDLSATSILYY

SEQ ID NO: 4939 - protein, 12 aa, synthetic construct
  REGION 1..12: note = GFR-binding peptide
PTQLSPINVLYF

SEQ ID NO: 4940 - protein, 15 aa, synthetic construct
  REGION 1..15: note = GFR-binding peptide
  VARIANT 1..2: note = Xaa is C or S
XXVPTKLSATSVLYY

SEQ ID NO: 4941 - protein, 19 aa, synthetic construct
  REGION 1..19: note = GFR-binding peptide
  VARIANT 5..6: note = Xaa is C or S
VPKPXXAPTQLSPISVLYK

SEQ ID NO: 4942 - protein, 11 aa, synthetic construct
  REGION 1..11: note = GFR-binding peptide
QDLEPISILYL

SEQ ID NO: 4943 - protein, 19 aa, synthetic construct
  REGION 1..19: note = GFR-binding peptide
  VARIANT 5..6: note = Xaa is C or S
ASKAXXVPTKLNAISILYF

SEQ ID NO: 4944 - protein, 18 aa, synthetic construct
  REGION 1..18: note = GFR-binding peptide
  VARIANT 4..5: note = Xaa is C or S
AAPXXVPQALNAISILYF

SEQ ID NO: 4945 - protein, 16 aa, synthetic construct
  REGION 1..16: note = GFR-binding peptide
  VARIANT 3: note = Xaa is C or S
PTXAPTKLSPISVLYK

SEQ ID NO: 4946 - protein, 20 aa, synthetic construct
  REGION 1..20: note = GFR-binding peptide
  VARIANT 6..7: note = Xaa is C or S
YVPKPXXAPTKLSPINVLYF

SEQ ID NO: 4947 - protein, 10 aa, synthetic construct
  REGION 1..10: note = GFR-binding peptide
ELSPINMLYF

SEQ ID NO: 4948 - protein, 15 aa, synthetic construct
  REGION 1..15: note = GFR-binding peptide
  VARIANT 1..2: note = Xaa is C or S
XXVSQDLNAISILYF

SEQ ID NO: 4949 - protein, 19 aa, synthetic construct
  REGION 1..19: note = GFR-binding peptide
  VARIANT 5..6: note = Xaa is C or S
VPKPXXAPTKLSPISVLYK

SEQ ID NO: 4950 - protein, 10 aa, synthetic construct
  REGION 1..10: note = GFR-binding peptide
KMSPISILYK

SEQ ID NO: 4951 - protein, 13 aa, synthetic construct
  REGION 1..13: note = GFR-binding peptide
VSQDLSPINILYF

SEQ ID NO: 4952 - protein, 13 aa, synthetic construct
  REGION 1..13: note = GFR-binding peptide
VPQDLSATSILYY

SEQ ID NO: 4953 - protein, 12 aa, synthetic construct
  REGION 1..12: note = GFR-binding peptide
PARLSATSILYY

SEQ ID NO: 4954 - protein, 17 aa, synthetic construct
  REGION 1..17: note = GFR-binding peptide
  VARIANT 3..4: note = Xaa is C or S
GPXXTPTKMEPISMLYL

SEQ ID NO: 4955 - protein, 11 aa, synthetic construct
  REGION 1..11: note = GFR-binding peptide
QALNAISILYF

SEQ ID NO: 4956 - protein, 20 aa, synthetic construct
  REGION 1..20: note = GFR-binding peptide
  VARIANT 6..7: note = Xaa is C or S
ASASPXXVSQDLNAISILYF

SEQ ID NO: 4957 - protein, 19 aa, synthetic construct
  REGION 1..19: note = GFR-binding peptide
  VARIANT 5..6: note = Xaa is C or S
VPSTXXAPVKTNAISMLYF

SEQ ID NO: 4958 - protein, 18 aa, synthetic construct
  REGION 1..18: note = GFR-binding peptide
  VARIANT 4..5: note = Xaa is C or S
AGPXXTPTKMSATSMLYY

SEQ ID NO: 4959 - protein, 10 aa, synthetic construct
  REGION 1..10: note = GFR-binding peptide
QLSPISVLYK

SEQ ID NO: 4960 - protein, 19 aa, synthetic construct
  REGION 1..19: note = GFR-binding peptide
  VARIANT 5..6: note = Xaa is C or S
VPSTXXAPVKTSPISMLYK

SEQ ID NO: 4961 - protein, 11 aa, synthetic construct
  REGION 1..11: note = GFR-binding peptide
VKTNAISMLYF

SEQ ID NO: 4962 - protein, 15 aa, synthetic construct
  REGION 1..15: note = GFR-binding peptide
  VARIANT 1..2: note = Xaa is C or S
XXVPQALEPISILYL

SEQ ID NO: 4963 - protein, 18 aa, synthetic construct
  REGION 1..18: note = GFR-binding peptide
  VARIANT 4..5: note = Xaa is C or S
ASPXXVPQDLNAISILYF

SEQ ID NO: 4964 - protein, 20 aa, synthetic construct
  REGION 1..20: note = GFR-binding peptide
  VARIANT 6..7: note = Xaa is C or S
ASASPXXVSQDLSPISILYK

SEQ ID NO: 4965 - protein, 15 aa, synthetic construct
  REGION 1..15: note = GFR-binding peptide
  VARIANT 1..2: note = Xaa is C or S
XXVPTELSATSMLYY

SEQ ID NO: 4966 - protein, 13 aa, synthetic construct
  REGION 1..13: note = GFR-binding peptide
VSQDLSPISILYK

SEQ ID NO: 4967 - protein, 16 aa, synthetic construct
  REGION 1..16: note = GFR-binding peptide
  VARIANT 2..3: note = Xaa is C or S
PXXVPQDLNAISILYF

SEQ ID NO: 4968 - protein, 14 aa, synthetic construct
  REGION 1..14: note = GFR-binding peptide
  VARIANT 1: note = Xaa is C or S
XAPTQLSATSVLYY

SEQ ID NO: 4969 - protein, 16 aa, synthetic construct
  REGION 1..16: note = GFR-binding peptide
  VARIANT 2..3: note = Xaa is C or S
SXXVPARLSATSILYY

SEQ ID NO: 4970 - protein, 9 aa, synthetic construct
  REGION 1..9: note = GFR-binding peptide
LSPISILYK

SEQ ID NO: 4971 - protein, 18 aa, synthetic construct
  REGION 1..18: note = GFR-binding peptide
  VARIANT 4..5: note = Xaa is C or S
PPTXXVPTRLNAISILYF

SEQ ID NO: 4972 - protein, 16 aa, synthetic construct
  REGION 1..16: note = GFR-binding peptide
  VARIANT 2..3: note = Xaa is C or S
PXXTPTKMNAISMLYF

SEQ ID NO: 4973 - protein, 19 aa, synthetic construct
  REGION 1..19: note = GFR-binding peptide
  VARIANT 5..6: note = Xaa is C or S
IPEPXXVPEKMNAISILYF

SEQ ID NO: 4974 - protein, 16 aa, synthetic construct
  REGION 1..16: note = GFR-binding peptide
  VARIANT 2..3: note = Xaa is C or S
PXXAPTQLSPISVLYK

SEQ ID NO: 4975 - protein, 18 aa, synthetic construct
  REGION 1..18: note = GFR-binding peptide
  VARIANT 4..5: note = Xaa is C or S
AAPXXVPQALEPISILYL

SEQ ID NO: 4976 - protein, 20 aa, synthetic construct
  REGION 1..20: note = GFR-binding peptide
  VARIANT 6..7: note = Xaa is C or S
HVPKPXXAPTKLEPISVLYL

SEQ ID NO: 4977 - protein, 15 aa, synthetic construct
  REGION 1..15: note = GFR-binding peptide
  VARIANT 1..2: note = Xaa is C or S
XXVPTKLSPISILYK

SEQ ID NO: 4978 - protein, 18 aa, synthetic construct
  REGION 1..18: note = GFR-binding peptide
  VARIANT 4..5: note = Xaa is C or S
PEPXXVPEKMSPISILYK

SEQ ID NO: 4979 - protein, 14 aa, synthetic construct
  REGION 1..14: note = GFR-binding peptide
  VARIANT 1: note = Xaa is C or S
XVPTKLSATSILYY

SEQ ID NO: 4980 - protein, 17 aa, synthetic construct
  REGION 1..17: note = GFR-binding peptide
  VARIANT 3..4: note = Xaa is C or S
SPXXVPQDLEPISILYL

SEQ ID NO: 4981 - protein, 20 aa, synthetic construct
  REGION 1..20: note = GFR-binding peptide
  VARIANT 6..7: note = Xaa is C or S
AAPASXXVPARLSPINILYF

SEQ ID NO: 4982 - protein, 13 aa, synthetic construct
  REGION 1..13: note = GFR-binding peptide
VPTKLSPINVLYF

SEQ ID NO: 4983 - protein, 13 aa, synthetic construct
  REGION 1..13: note = GFR-binding peptide
VPEKMSPINILYF

SEQ ID NO: 4984 - protein, 10 aa, synthetic construct
  REGION 1..10: note = GFR-binding peptide
KLSPINVLYF

SEQ ID NO: 4985 - protein, 10 aa, synthetic construct
  REGION 1..10: note = GFR-binding peptide
KMSATSILYY

SEQ ID NO: 4986 - protein, 12 aa, synthetic construct
  REGION 1..12: note = GFR-binding peptide
PVKTSPISMLYK

SEQ ID NO: 4987 - protein, 14 aa, synthetic construct
  REGION 1..14: note = GFR-binding peptide
  VARIANT 1: note = Xaa is C or S
XVPEKMEPISILYL

SEQ ID NO: 4988 - protein, 17 aa, synthetic construct
  REGION 1..17: note = GFR-binding peptide
  VARIANT 4: note = Xaa is C or S
KPTXAPTKLSPINVLYF

SEQ ID NO: 4989 - protein, 14 aa, synthetic construct
  REGION 1..14: note = GFR-binding peptide
  VARIANT 1: note = Xaa is C or S
XVPTELEPISMLYL

SEQ ID NO: 4990 - protein, 16 aa, synthetic construct
  REGION 1..16: note = GFR-binding peptide
  VARIANT 2..3: note = Xaa is C or S
PXXVPQALNAISILYF

SEQ ID NO: 4991 - protein, 16 aa, synthetic construct
  REGION 1..16: note = GFR-binding peptide
  VARIANT 2..3: note = Xaa is C or S
PXXVSQDLEPISILYL

SEQ ID NO: 4992 - protein, 17 aa, synthetic construct
  REGION 1..17: note = GFR-binding peptide
  VARIANT 3..4: note = Xaa is C or S
EPXXVPEKMSATSILYY

SEQ ID NO: 4993 - protein, 14 aa, synthetic construct
  REGION 1..14: note = GFR-binding peptide
  VARIANT 1: note = Xaa is C or S
XAPTKLSPISVLYK

SEQ ID NO: 4994 - protein, 14 aa, synthetic construct
  REGION 1..14: note = GFR-binding peptide
  VARIANT 1: note = Xaa is C or S
XVPEKMNAISILYF

SEQ ID NO: 4995 - protein, 19 aa, synthetic construct
  REGION 1..19: note = GFR-binding peptide
  VARIANT 5..6: note = Xaa is C or S
TPPTXXVPTRLNAISILYF

SEQ ID NO: 4996 - protein, 16 aa, synthetic construct
  REGION 1..16: note = GFR-binding peptide
  VARIANT 2..3: note = Xaa is C or S
PXXVPQALEPISILYL

SEQ ID NO: 4997 - protein, 12 aa, synthetic construct
  REGION 1..12: note = GFR-binding peptide
PTKLSPINILYF

SEQ ID NO: 4998 - protein, 12 aa, synthetic construct
  REGION 1..12: note = GFR-binding peptide
PTELSPINMLYF

SEQ ID NO: 4999 - protein, 17 aa, synthetic construct
  REGION 1..17: note = GFR-binding peptide
  VARIANT 3..4: note = Xaa is C or S
GPXXTPTKMNAISMLYF

SEQ ID NO: 5000 - protein, 17 aa, synthetic construct
  REGION 1..17: note = GFR-binding peptide
  VARIANT 3..4: note = Xaa is C or S
KAXXVPTKLSATSILYY

SEQ ID NO: 5001 - protein, 13 aa, synthetic construct
  REGION 1..13: note = GFR-binding peptide
APVKTSPINMLYF

SEQ ID NO: 5002 - protein, 11 aa, synthetic construct
  REGION 1..11: note = GFR-binding peptide
EKMSPISILYK

SEQ ID NO: 5003 - protein, 18 aa, synthetic construct
  REGION 1..18: note = GFR-binding peptide
  VARIANT 4..5: note = Xaa is C or S
ASPXXVSQDLSATSILYY

SEQ ID NO: 5004 - protein, 14 aa, synthetic construct
  REGION 1..14: note = GFR-binding peptide
  VARIANT 1: note = Xaa is C or S
XVPTKLEPISVLYL

SEQ ID NO: 5005 - protein, 20 aa, synthetic construct
  REGION 1..20: note = GFR-binding peptide
  VARIANT 6..7: note = Xaa is C or S
STPPTXXVPTRLNAISILYF

SEQ ID NO: 5006 - protein, 10 aa, synthetic construct
  REGION 1..10: note = GFR-binding peptide
ALSPISILYK

SEQ ID NO: 5007 - protein, 18 aa, synthetic construct
  REGION 1..18: note = GFR-binding peptide
  VARIANT 4..5: note = Xaa is C or S
PKAXXVPTELSATSMLYY

SEQ ID NO: 5008 - protein, 16 aa, synthetic construct
  REGION 1..16: note = GFR-binding peptide
  VARIANT 2..3: note = Xaa is C or S
AXXAPTKLEPISVLYL

SEQ ID NO: 5009 - protein, 13 aa, synthetic construct
  REGION 1..13: note = GFR-binding peptide
VPTRLNAISILYF

SEQ ID NO: 5010 - protein, 17 aa, synthetic construct
  REGION 1..17: note = GFR-binding peptide
  VARIANT 3..4: note = Xaa is C or S
KAXXAPTKLSPISVLYK

SEQ ID NO: 5011 - protein, 13 aa, synthetic construct
  REGION 1..13: note = GFR-binding peptide
VPARLSATSILYY

SEQ ID NO: 5012 - protein, 12 aa, synthetic construct
  REGION 1..12: note = GFR-binding peptide
PQALSATSILYY

SEQ ID NO: 5013 - protein, 11 aa, synthetic construct
  REGION 1..11: note = GFR-binding peptide
TKLSATSILYY

SEQ ID NO: 5014 - protein, 19 aa, synthetic construct
  REGION 1..19: note = GFR-binding peptide
  VARIANT 5..6: note = Xaa is C or S
IPEPXXVPEKMEPISILYL

SEQ ID NO: 5015 - protein, 12 aa, synthetic construct
  REGION 1..12: note = GFR-binding peptide
PQDLSPISILYK

SEQ ID NO: 5016 - protein, 13 aa, synthetic construct
  REGION 1..13: note = GFR-binding peptide
VPQALSPISILYK

SEQ ID NO: 5017 - protein, 15 aa, synthetic construct
  REGION 1..15: note = GFR-binding peptide
  VARIANT 1..2: note = Xaa is C or S
XXAPTQLSPISVLYK

SEQ ID NO: 5018 - protein, 11 aa, synthetic construct
  REGION 1..11: note = GFR-binding peptide
TELSATSMLYY

SEQ ID NO: 5019 - protein, 15 aa, synthetic construct
  REGION 1..15: note = GFR-binding peptide
  VARIANT 1..2: note = Xaa is C or S
XXVPTELNAISMLYF

SEQ ID NO: 5020 - protein, 15 aa, synthetic construct
  REGION 1..15: note = GFR-binding peptide
  VARIANT 1..2: note = Xaa is C or S
XXVSQDLEPISILYL

SEQ ID NO: 5021 - protein, 11 aa, synthetic construct
  REGION 1..11: note = GFR-binding peptide
VKTEPISMLYL

SEQ ID NO: 5022 - protein, 18 aa, synthetic construct
  REGION 1..18: note = GFR-binding peptide
  VARIANT 4..5: note = Xaa is C or S
PASXXVPARLEPISILYL

SEQ ID NO: 5023 - protein, 19 aa, synthetic construct
  REGION 1..19: note = GFR-binding peptide
  VARIANT 6: note = Xaa is C or S
VTKPTXAPTKLSPISVLYK

SEQ ID NO: 5024 - protein, 16 aa, synthetic construct
  REGION 1..16: note = GFR-binding peptide
  VARIANT 2..3: note = Xaa is C or S
TXXVPTRLSPISILYK

SEQ ID NO: 5025 - protein, 15 aa, synthetic construct
  REGION 1..15: note = GFR-binding peptide
  VARIANT 1..2: note = Xaa is C or S
XXVPEKMSATSILYY

SEQ ID NO: 5026 - protein, 18 aa, synthetic construct
  REGION 1..18: note = GFR-binding peptide
  VARIANT 4..5: note = Xaa is C or S
PKAXXAPTKLSPISVLYK

SEQ ID NO: 5027 - protein, 11 aa, synthetic construct
  REGION 1..11: note = GFR-binding peptide
EKMSATSILYY

SEQ ID NO: 5028 - protein, 13 aa, synthetic construct
  REGION 1..13: note = GFR-binding peptide
VPTELSPINMLYF

SEQ ID NO: 5029 - protein, 19 aa, synthetic construct
  REGION 1..19: note = GFR-binding peptide
  VARIANT 5..6: note = Xaa is C or S
VPKPXXAPTKLSATSVLYY

SEQ ID NO: 5030 - protein, 19 aa, synthetic construct
  REGION 1..19: note = GFR-binding peptide
  VARIANT 5..6: note = Xaa is C or S
TPPTXXVPTRLEPISILYL

SEQ ID NO: 5031 - protein, 20 aa, synthetic construct
  REGION 1..20: note = GFR-binding peptide
  VARIANT 6..7: note = Xaa is C or S
KIPKAXXVPTELSPISMLYK

SEQ ID NO: 5032 - protein, 11 aa, synthetic construct
  REGION 1..11: note = GFR-binding peptide
TRLSPINILYF

SEQ ID NO: 5033 - protein, 18 aa, synthetic construct
  REGION 1..18: note = GFR-binding peptide
  VARIANT 4..5: note = Xaa is C or S
SKAXXVPTKLNAISILYF

SEQ ID NO: 5034 - protein, 18 aa, synthetic construct
  REGION 1..18: note = GFR-binding peptide
  VARIANT 4..5: note = Xaa is C or S
AGPXXTPTKMSPISMLYK

SEQ ID NO: 5035 - protein, 10 aa, synthetic construct
  REGION 1..10: note = GFR-binding peptide
KMNAISMLYF

SEQ ID NO: 5036 - protein, 20 aa, synthetic construct
  REGION 1..20: note = GFR-binding peptide
  VARIANT 6..7: note = Xaa is C or S
ASASPXXVSQDLSATSILYY

SEQ ID NO: 5037 - protein, 14 aa, synthetic construct
  REGION 1..14: note = GFR-binding peptide
  VARIANT 1: note = Xaa is C or S
XAPVKTEPISMLYL

SEQ ID NO: 5038 - protein, 12 aa, synthetic construct
  REGION 1..12: note = GFR-binding peptide
SQDLSPISILYK

SEQ ID NO: 5039 - protein, 20 aa, synthetic construct
  REGION 1..20: note = GFR-binding peptide
  VARIANT 6..7: note = Xaa is C or S
KIPKAXXVPTELSATSMLYY

SEQ ID NO: 5040 - protein, 18 aa, synthetic construct
  REGION 1..18: note = GFR-binding peptide
  VARIANT 4..5: note = Xaa is C or S
PPTXXVPTRLEPISILYL

SEQ ID NO: 5041 - protein, 12 aa, synthetic construct
  REGION 1..12: note = GFR-binding peptide
PQDLSATSILYY

SEQ ID NO: 5042 - protein, 16 aa, synthetic construct
  REGION 1..16: note = GFR-binding peptide
  VARIANT 2..3: note = Xaa is C or S
PXXVSQDLNAISILYF

SEQ ID NO: 5043 - protein, 15 aa, synthetic construct
  REGION 1..15: note = GFR-binding peptide
  VARIANT 1..2: note = Xaa is C or S
XXAPVKTEPISMLYL

SEQ ID NO: 5044 - protein, 14 aa, synthetic construct
  REGION 1..14: note = GFR-binding peptide
  VARIANT 1: note = Xaa is C or S
XVPTELNAISMLYF

SEQ ID NO: 5045 - protein, 16 aa, synthetic construct
  REGION 1..16: note = GFR-binding peptide
  VARIANT 2..3: note = Xaa is C or S
PXXVPEKMSATSILYY

SEQ ID NO: 5046 - protein, 12 aa, synthetic construct
  REGION 1..12: note = GFR-binding peptide
PTKLSPINVLYF

SEQ ID NO: 5047 - protein, 20 aa, synthetic construct
  REGION 1..20: note = GFR-binding peptide
  VARIANT 6..7: note = Xaa is C or S
ASASPXXVPQDLNAISILYF

SEQ ID NO: 5048 - protein, 15 aa, synthetic construct
  REGION 1..15: note = GFR-binding peptide
  VARIANT 1..2: note = Xaa is C or S
XXVPTKLSATSILYY

SEQ ID NO: 5049 - protein, 14 aa, synthetic construct
  REGION 1..14: note = GFR-binding peptide
  VARIANT 1: note = Xaa is C or S
XVPTKLNAISVLYF

SEQ ID NO: 5050 - protein, 10 aa, synthetic construct
  REGION 1..10: note = GFR-binding peptide
DLSPISILYK

SEQ ID NO: 5051 - protein, 19 aa, synthetic construct
  REGION 1..19: note = GFR-binding peptide
  VARIANT 5..6: note = Xaa is C or S
IPKAXXVPTELEPISMLYL

SEQ ID NO: 5052 - protein, 15 aa, synthetic construct
  REGION 1..15: note = GFR-binding peptide
  VARIANT 1..2: note = Xaa is C or S
XXAPTQLSATSVLYY

SEQ ID NO: 5053 - protein, 13 aa, synthetic construct
  REGION 1..13: note = GFR-binding peptide
VPTRLEPISILYL

SEQ ID NO: 5054 - protein, 19 aa, synthetic construct
  REGION 1..19: note = GFR-binding peptide
  VARIANT 6: note = Xaa is C or S
VTKPTXAPTKLSATSVLYY

SEQ ID NO: 5055 - protein, 10 aa, synthetic construct
  REGION 1..10: note = GFR-binding peptide
KLSPINILYF

SEQ ID NO: 5056 - protein, 17 aa, synthetic construct
  REGION 1..17: note = GFR-binding peptide
  VARIANT 3..4: note = Xaa is C or S
PTXXVPTRLNAISILYF

SEQ ID NO: 5057 - protein, 16 aa, synthetic construct
  REGION 1..16: note = GFR-binding peptide
  VARIANT 2..3: note = Xaa is C or S
PXXTPTKMEPISMLYL

SEQ ID NO: 5058 - protein, 11 aa, synthetic construct
  REGION 1..11: note = GFR-binding peptide
TKLSPISILYK

SEQ ID NO: 5059 - protein, 17 aa, synthetic construct
  REGION 1..17: note = GFR-binding peptide
  VARIANT 3..4: note = Xaa is C or S
KAXXVPTKLSPISILYK

SEQ ID NO: 5060 - protein, 20 aa, synthetic construct
  REGION 1..20: note = GFR-binding peptide
  VARIANT 6..7: note = Xaa is C or S
KASKAXXVPTKLSATSILYY

SEQ ID NO: 5061 - protein, 10 aa, synthetic construct
  REGION 1..10: note = GFR-binding peptide
KMEPISMLYL

SEQ ID NO: 5062 - protein, 12 aa, synthetic construct
  REGION 1..12: note = GFR-binding peptide
PTKMNAISMLYF

SEQ ID NO: 5063 - protein, 14 aa, synthetic construct
  REGION 1..14: note = GFR-binding peptide
  VARIANT 1: note = Xaa is C or S
XVPARLSPINILYF

SEQ ID NO: 5064 - protein, 18 aa, synthetic construct
  REGION 1..18: note = GFR-binding peptide
  VARIANT 4..5: note = Xaa is C or S
PEPXXVPEKMSATSILYY

SEQ ID NO: 5065 - protein, 17 aa, synthetic construct
  REGION 1..17: note = GFR-binding peptide
  VARIANT 3..4: note = Xaa is C or S
SPXXVSQDLNAISILYF

SEQ ID NO: 5066 - protein, 12 aa, synthetic construct
  REGION 1..12: note = GFR-binding peptide
PEKMSPINILYF

SEQ ID NO: 5067 - protein, 18 aa, synthetic construct
  REGION 1..18: note = GFR-binding peptide
  VARIANT 4..5: note = Xaa is C or S
PKAXXVPTELSPISMLYK

SEQ ID NO: 5068 - protein, 10 aa, synthetic construct
  REGION 1..10: note = GFR-binding peptide
ALSATSILYY

SEQ ID NO: 5069 - protein, 10 aa, synthetic construct
  REGION 1..10: note = GFR-binding peptide
ELSPISMLYK

SEQ ID NO: 5070 - protein, 18 aa, synthetic construct
  REGION 1..18: note = GFR-binding peptide
  VARIANT 4..5: note = Xaa is C or S
ASPXXVSQDLSPISILYK

SEQ ID NO: 5071 - protein, 19 aa, synthetic construct
  REGION 1..19: note = GFR-binding peptide
  VARIANT 5..6: note = Xaa is C or S
SASPXXVSQDLSATSILYY

SEQ ID NO: 5072 - protein, 17 aa, synthetic construct
  REGION 1..17: note = GFR-binding peptide
  VARIANT 3..4: note = Xaa is C or S
STXXAPVKTEPISMLYL

SEQ ID NO: 5073 - protein, 9 aa, synthetic construct
  REGION 1..9: note = GFR-binding peptide
TNAISMLYF

SEQ ID NO: 5074 - protein, 19 aa, synthetic construct
  REGION 1..19: note = GFR-binding peptide
  VARIANT 5..6: note = Xaa is C or S
IPEPXXVPEKMSATSILYY

SEQ ID NO: 5075 - protein, 18 aa, synthetic construct
  REGION 1..18: note = GFR-binding peptide
  VARIANT 4..5: note = Xaa is C or S
PPTXXVPTRLSATSILYY

SEQ ID NO: 5076 - protein, 15 aa, synthetic construct
  REGION 1..15: note = GFR-binding peptide
  VARIANT 1..2: note = Xaa is C or S
XXAPTKLEPISVLYL

SEQ ID NO: 5077 - protein, 17 aa, synthetic construct
  REGION 1..17: note = GFR-binding peptide
  VARIANT 3..4: note = Xaa is C or S
EPXXVPEKMEPISILYL

SEQ ID NO: 5078 - protein, 15 aa, synthetic construct
  REGION 1..15: note = GFR-binding peptide
  VARIANT 1..2: note = Xaa is C or S
XXAPVKTNAISMLYF

SEQ ID NO: 5079 - protein, 10 aa, synthetic construct
  REGION 1..10: note = GFR-binding peptide
RLSPINILYF

SEQ ID NO: 5080 - protein, 19 aa, synthetic construct
  REGION 1..19: note = GFR-binding peptide
  VARIANT 5..6: note = Xaa is C or S
VPKPXXAPTKLEPISVLYL

SEQ ID NO: 5081 - protein, 17 aa, synthetic construct
  REGION 1..17: note = GFR-binding peptide
  VARIANT 3..4: note = Xaa is C or S
ASXXVPARLEPISILYL

SEQ ID NO: 5082 - protein, 15 aa, synthetic construct
  REGION 1..15: note = GFR-binding peptide
  VARIANT 1..2: note = Xaa is C or S
XXAPVKTSPISMLYK

SEQ ID NO: 5083 - protein, 13 aa, synthetic construct
  REGION 1..13: note = GFR-binding peptide
VPTKLSPINILYF

SEQ ID NO: 5084 - protein, 19 aa, synthetic construct
  REGION 1..19: note = GFR-binding peptide
  VARIANT 6: note = Xaa is C or S
VTKPTXAPTKLSPINVLYF

SEQ ID NO: 5085 - protein, 12 aa, synthetic construct
  REGION 1..12: note = GFR-binding peptide
PARLNAISILYF

SEQ ID NO: 5086 - protein, 19 aa, synthetic construct
  REGION 1..19: note = GFR-binding peptide
  VARIANT 5..6: note = Xaa is C or S
VGKAXXVPTKLEPISVLYL

SEQ ID NO: 5087 - protein, 13 aa, synthetic construct
  REGION 1..13: note = GFR-binding peptide
VSQDLSATSILYY

SEQ ID NO: 5088 - protein, 10 aa, synthetic construct
  REGION 1..10: note = GFR-binding peptide
ELNAISMLYF

SEQ ID NO: 5089 - protein, 14 aa, synthetic construct
  REGION 1..14: note = GFR-binding peptide
  VARIANT 1: note = Xaa is C or S
XVPTKLSPINVLYF

SEQ ID NO: 5090 - protein, 10 aa, synthetic construct
  REGION 1..10: note = GFR-binding peptide
KTSATSMLYY

SEQ ID NO: 5091 - protein, 16 aa, synthetic construct
  REGION 1..16: note = GFR-binding peptide
  VARIANT 2..3: note = Xaa is C or S
PXXVPQDLEPISILYL

SEQ ID NO: 5092 - protein, 10 aa, synthetic construct
  REGION 1..10: note = GFR-binding peptide
KMSPISMLYK

SEQ ID NO: 5093 - protein, 14 aa, synthetic construct
  REGION 1..14: note = GFR-binding peptide
  VARIANT 1: note = Xaa is C or S
XVPTRLEPISILYL

SEQ ID NO: 5094 - protein, 11 aa, synthetic construct
  REGION 1..11: note = GFR-binding peptide
VKTSATSMLYY

SEQ ID NO: 5095 - protein, 11 aa, synthetic construct
  REGION 1..11: note = GFR-binding peptide
TQLSPINVLYF

SEQ ID NO: 5096 - protein, 10 aa, synthetic construct
  REGION 1..10: note = GFR-binding peptide
KMEPISILYL

SEQ ID NO: 5097 - protein, 11 aa, synthetic construct
  REGION 1..11: note = GFR-binding peptide
QALEPISILYL

SEQ ID NO: 5098 - protein, 18 aa, synthetic construct
  REGION 1..18: note = GFR-binding peptide
  VARIANT 4..5: note = Xaa is C or S
PKPXXAPTQLSPINVLYF

SEQ ID NO: 5099 - protein, 15 aa, synthetic construct
  REGION 1..15: note = GFR-binding peptide
  VARIANT 1..2: note = Xaa is C or S
XXVPEKMNAISILYF

SEQ ID NO: 5100 - protein, 10 aa, synthetic construct
  REGION 1..10: note = GFR-binding peptide
RLEPISILYL

SEQ ID NO: 5101 - protein, 13 aa, synthetic construct
  REGION 1..13: note = GFR-binding peptide
VPARLNAISILYF

SEQ ID NO: 5102 - protein, 9 aa, synthetic construct
  REGION 1..9: note = GFR-binding peptide
MSATSILYY

SEQ ID NO: 5103 - protein, 20 aa, synthetic construct
  REGION 1..20: note = GFR-binding peptide
  VARIANT 6..7: note = Xaa is C or S
SIPKAXXVPTELEPISMLYL

SEQ ID NO: 5104 - protein, 20 aa, synthetic construct
  REGION 1..20: note = GFR-binding peptide
  VARIANT 7: note = Xaa is C or S
HVTKPTXAPTKLEPISVLYL

SEQ ID NO: 5105 - protein, 15 aa, synthetic construct
  REGION 1..15: note = GFR-binding peptide
  VARIANT 1..2: note = Xaa is C or S
XXVPARLSPISILYK

SEQ ID NO: 5106 - protein, 20 aa, synthetic construct
  REGION 1..20: note = GFR-binding peptide
  VARIANT 6..7: note = Xaa is C or S
HVPKPXXAPTKLSPINVLYF

SEQ ID NO: 5107 - protein, 19 aa, synthetic construct
  REGION 1..19: note = GFR-binding peptide
  VARIANT 5..6: note = Xaa is C or S
VPKPXXAPTQLSATSVLYY

SEQ ID NO: 5108 - protein, 17 aa, synthetic construct
  REGION 1..17: note = GFR-binding peptide
  VARIANT 3..4: note = Xaa is C or S
GPXXTPTKMSPISMLYK

SEQ ID NO: 5109 - protein, 14 aa, synthetic construct
  REGION 1..14: note = GFR-binding peptide
  VARIANT 1: note = Xaa is C or S
XAPVKTSPISMLYK

SEQ ID NO: 5110 - protein, 15 aa, synthetic construct
  REGION 1..15: note = GFR-binding peptide
  VARIANT 2: note = Xaa is C or S
TXAPTKLEPISVLYL

SEQ ID NO: 5111 - protein, 11 aa, synthetic construct
  REGION 1..11: note = GFR-binding peptide
QALSPINILYF

SEQ ID NO: 5112 - protein, 19 aa, synthetic construct
  REGION 1..19: note = GFR-binding peptide
  VARIANT 5..6: note = Xaa is C or S
TPPTXXVPTRLSPISILYK

SEQ ID NO: 5113 - protein, 17 aa, synthetic construct
  REGION 1..17: note = GFR-binding peptide
  VARIANT 3..4: note = Xaa is C or S
KAXXVPTELSPINMLYF

SEQ ID NO: 5114 - protein, 17 aa, synthetic construct
  REGION 1..17: note = GFR-binding peptide
  VARIANT 3..4: note = Xaa is C or S
SPXXVPQDLNAISILYF

SEQ ID NO: 5115 - protein, 15 aa, synthetic construct
  REGION 1..15: note = GFR-binding peptide
  VARIANT 1..2: note = Xaa is C or S
XXVPTKLSPINILYF

SEQ ID NO: 5116 - protein, 20 aa, synthetic construct
  REGION 1..20: note = GFR-binding peptide
  VARIANT 6..7: note = Xaa is C or S
ASASPXXVSQDLSPINILYF

SEQ ID NO: 5117 - protein, 16 aa, synthetic construct
  REGION 1..16: note = GFR-binding peptide
  VARIANT 2..3: note = Xaa is C or S
PXXVPQDLSPINILYF

SEQ ID NO: 5118 - protein, 18 aa, synthetic construct
  REGION 1..18: note = GFR-binding peptide
  VARIANT 4..5: note = Xaa is C or S
PASXXVPARLNAISILYF

SEQ ID NO: 5119 - protein, 19 aa, synthetic construct
  REGION 1..19: note = GFR-binding peptide
  VARIANT 5..6: note = Xaa is C or S
APASXXVPARLSATSILYY

SEQ ID NO: 5120 - protein, 11 aa, synthetic construct
  REGION 1..11: note = GFR-binding peptide
TQLEPISVLYL

SEQ ID NO: 5121 - protein, 9 aa, synthetic construct
  REGION 1..9: note = GFR-binding peptide
LSATSMLYY

SEQ ID NO: 5122 - protein, 14 aa, synthetic construct
  REGION 1..14: note = GFR-binding peptide
  VARIANT 1: note = Xaa is C or S
XAPVKTNAISMLYF

SEQ ID NO: 5123 - protein, 18 aa, synthetic construct
  REGION 1..18: note = GFR-binding peptide
  VARIANT 4..5: note = Xaa is C or S
PKAXXVPTELNAISMLYF

SEQ ID NO: 5124 - protein, 13 aa, synthetic construct
  REGION 1..13: note = GFR-binding peptide
VPQALSATSILYY

SEQ ID NO: 5125 - protein, 13 aa, synthetic construct
  REGION 1..13: note = GFR-binding peptide
VPTKLEPISVLYL

SEQ ID NO: 5126 - protein, 18 aa, synthetic construct
  REGION 1..18: note = GFR-binding peptide
  VARIANT 4..5: note = Xaa is C or S
AGPXXTPTKMEPISMLYL

SEQ ID NO: 5127 - protein, 13 aa, synthetic construct
  REGION 1..13: note = GFR-binding peptide
VPEKMSPISILYK

SEQ ID NO: 5128 - protein, 13 aa, synthetic construct
  REGION 1..13: note = GFR-binding peptide
VPARLSPISILYK

SEQ ID NO: 5129 - protein, 15 aa, synthetic construct
  REGION 1..15: note = GFR-binding peptide
  VARIANT 1..2: note = Xaa is C or S
XXVPEKMSPISILYK

SEQ ID NO: 5130 - protein, 15 aa, synthetic construct
  REGION 1..15: note = GFR-binding peptide
  VARIANT 1..2: note = Xaa is C or S
XXVPTKLEPISVLYL

SEQ ID NO: 5131 - protein, 17 aa, synthetic construct
  REGION 1..17: note = GFR-binding peptide
  VARIANT 3..4: note = Xaa is C or S
APXXVPQALSPISILYK

SEQ ID NO: 5132 - protein, 12 aa, synthetic construct
  REGION 1..12: note = GFR-binding peptide
PTRLSPISILYK

SEQ ID NO: 5133 - protein, 13 aa, synthetic construct
  REGION 1..13: note = GFR-binding peptide
VPEKMNAISILYF

SEQ ID NO: 5134 - protein, 18 aa, synthetic construct
  REGION 1..18: note = GFR-binding peptide
  VARIANT 4..5: note = Xaa is C or S
GKAXXVPTKLNAISVLYF

SEQ ID NO: 5135 - protein, 10 aa, synthetic construct
  REGION 1..10: note = GFR-binding peptide
KLSATSILYY

SEQ ID NO: 5136 - protein, 20 aa, synthetic construct
  REGION 1..20: note = GFR-binding peptide
  VARIANT 6..7: note = Xaa is C or S
STPPTXXVPTRLSATSILYY

SEQ ID NO: 5137 - protein, 15 aa, synthetic construct
  REGION 1..15: note = GFR-binding peptide
  VARIANT 1..2: note = Xaa is C or S
XXVPARLNAISILYF

SEQ ID NO: 5138 - protein, 15 aa, synthetic construct
  REGION 1..15: note = GFR-binding peptide
  VARIANT 1..2: note = Xaa is C or S
XXVPQALSATSILYY

SEQ ID NO: 5139 - protein, 17 aa, synthetic construct
  REGION 1..17: note = GFR-binding peptide
  VARIANT 3..4: note = Xaa is C or S
ASXXVPARLSPINILYF

SEQ ID NO: 5140 - protein, 12 aa, synthetic construct
  REGION 1..12: note = GFR-binding peptide
PTRLNAISILYF

SEQ ID NO: 5141 - protein, 14 aa, synthetic construct
  REGION 1..14: note = GFR-binding peptide
  VARIANT 1: note = Xaa is C or S
XAPTKLSPINVLYF

SEQ ID NO: 5142 - protein, 17 aa, synthetic construct
  REGION 1..17: note = GFR-binding peptide
  VARIANT 3..4: note = Xaa is C or S
APXXVPQALNAISILYF

SEQ ID NO: 5143 - protein, 20 aa, synthetic construct
  REGION 1..20: note = GFR-binding peptide
  VARIANT 6..7: note = Xaa is C or S
AVPKAXXAPTKLSPINVLYF

SEQ ID NO: 5144 - protein, 19 aa, synthetic construct
  REGION 1..19: note = GFR-binding peptide
  VARIANT 5..6: note = Xaa is C or S
VPKPXXAPTKLSPINVLYF

SEQ ID NO: 5145 - protein, 12 aa, synthetic construct
  REGION 1..12: note = GFR-binding peptide
SQDLSATSILYY

SEQ ID NO: 5146 - protein, 20 aa, synthetic construct
  REGION 1..20: note = GFR-binding peptide
  VARIANT 6..7: note = Xaa is C or S
GIPEPXXVPEKMSPINILYF

SEQ ID NO: 5147 - protein, 18 aa, synthetic construct
  REGION 1..18: note = GFR-binding peptide
  VARIANT 4..5: note = Xaa is C or S
ASPXXVPQDLSPISILYK

SEQ ID NO: 5148 - protein, 13 aa, synthetic construct
  REGION 1..13: note = GFR-binding peptide
APTKLSPINVLYF

SEQ ID NO: 5149 - protein, 19 aa, synthetic construct
  REGION 1..19: note = GFR-binding peptide
  VARIANT 5..6: note = Xaa is C or S
VPSTXXAPVKTEPISMLYL

SEQ ID NO: 5150 - protein, 20 aa, synthetic construct
  REGION 1..20: note = GFR-binding peptide
  VARIANT 6..7: note = Xaa is C or S
RVPSTXXAPVKTSPISMLYK

SEQ ID NO: 5151 - protein, 16 aa, synthetic construct
  REGION 1..16: note = GFR-binding peptide
  VARIANT 2..3: note = Xaa is C or S
SXXVPARLSPINILYF

SEQ ID NO: 5152 - protein, 19 aa, synthetic construct
  REGION 1..19: note = GFR-binding peptide
  VARIANT 5..6: note = Xaa is C or S
SAAPXXVPQALSATSILYY

SEQ ID NO: 5153 - protein, 17 aa, synthetic construct
  REGION 1..17: note = GFR-binding peptide
  VARIANT 3..4: note = Xaa is C or S
KAXXAPTKLNAISVLYF

SEQ ID NO: 5154 - protein, 17 aa, synthetic construct
  REGION 1..17: note = GFR-binding peptide
  VARIANT 3..4: note = Xaa is C or S
SPXXVPQDLSPISILYK

SEQ ID NO: 5155 - protein, 12 aa, synthetic construct
  REGION 1..12: note = GFR-binding peptide
PTKMSATSMLYY

SEQ ID NO: 5156 - protein, 19 aa, synthetic construct
  REGION 1..19: note = GFR-binding peptide
  VARIANT 5..6: note = Xaa is C or S
SASPXXVPQDLSATSILYY

SEQ ID NO: 5157 - protein, 16 aa, synthetic construct
  REGION 1..16: note = GFR-binding peptide
  VARIANT 2..3: note = Xaa is C or S
PXXVPQALSPISILYK

SEQ ID NO: 5158 - protein, 12 aa, synthetic construct
  REGION 1..12: note = GFR-binding peptide
PEKMSPISILYK

SEQ ID NO: 5159 - protein, 16 aa, synthetic construct
  REGION 1..16: note = GFR-binding peptide
  VARIANT 2..3: note = Xaa is C or S
PXXAPTQLEPISVLYL

SEQ ID NO: 5160 - protein, 14 aa, synthetic construct
  REGION 1..14: note = GFR-binding peptide
  VARIANT 1: note = Xaa is C or S
XVPEKMSPISILYK

SEQ ID NO: 5161 - protein, 14 aa, synthetic construct
  REGION 1..14: note = GFR-binding peptide
  VARIANT 1: note = Xaa is C or S
XVPTRLSPINILYF

SEQ ID NO: 5162 - protein, 16 aa, synthetic construct
  REGION 1..16: note = GFR-binding peptide
  VARIANT 2..3: note = Xaa is C or S
PXXAPTKLSATSVLYY

SEQ ID NO: 5163 - protein, 20 aa, synthetic construct
  REGION 1..20: note = GFR-binding peptide
  VARIANT 6..7: note = Xaa is C or S
KASKAXXVPTKLSPINILYF

SEQ ID NO: 5164 - protein, 17 aa, synthetic construct
  REGION 1..17: note = GFR-binding peptide
  VARIANT 3..4: note = Xaa is C or S
KAXXVPTKLNAISVLYF

SEQ ID NO: 5165 - protein, 15 aa, synthetic construct
  REGION 1..15: note = GFR-binding peptide
  VARIANT 1..2: note = Xaa is C or S
XXTPTKMNAISMLYF

SEQ ID NO: 5166 - protein, 17 aa, synthetic construct
  REGION 1..17: note = GFR-binding peptide
  VARIANT 3..4: note = Xaa is C or S
KPXXAPTKLEPISVLYL

SEQ ID NO: 5167 - protein, 15 aa, synthetic construct
  REGION 1..15: note = GFR-binding peptide
  VARIANT 1..2: note = Xaa is C or S
XXVPQDLNAISILYF

SEQ ID NO: 5168 - protein, 17 aa, synthetic construct
  REGION 1..17: note = GFR-binding peptide
  VARIANT 3..4: note = Xaa is C or S
EPXXVPEKMSPINILYF

SEQ ID NO: 5169 - protein, 14 aa, synthetic construct
  REGION 1..14: note = GFR-binding peptide
  VARIANT 1: note = Xaa is C or S
XVPTELSPISMLYK

SEQ ID NO: 5170 - protein, 18 aa, synthetic construct
  REGION 1..18: note = GFR-binding peptide
  VARIANT 4..5: note = Xaa is C or S
PEPXXVPEKMNAISILYF

SEQ ID NO: 5171 - protein, 15 aa, synthetic construct
  REGION 1..15: note = GFR-binding peptide
  VARIANT 1..2: note = Xaa is C or S
XXVPTRLSPISILYK

SEQ ID NO: 5172 - protein, 17 aa, synthetic construct
  REGION 1..17: note = GFR-binding peptide
  VARIANT 3..4: note = Xaa is C or S
SPXXVSQDLSATSILYY

SEQ ID NO: 5173 - protein, 12 aa, synthetic construct
  REGION 1..12: note = GFR-binding peptide
PQALSPINILYF

SEQ ID NO: 5174 - protein, 9 aa, synthetic construct
  REGION 1..9: note = GFR-binding peptide
MEPISMLYL

SEQ ID NO: 5175 - protein, 16 aa, synthetic construct
  REGION 1..16: note = GFR-binding peptide
  VARIANT 2..3: note = Xaa is C or S
TXXVPTRLNAISILYF

SEQ ID NO: 5176 - protein, 11 aa, synthetic construct
  REGION 1..11: note = GFR-binding peptide
QDLSATSILYY

SEQ ID NO: 5177 - protein, 12 aa, synthetic construct
  REGION 1..12: note = GFR-binding peptide
PTELSATSMLYY

SEQ ID NO: 5178 - protein, 20 aa, synthetic construct
  REGION 1..20: note = GFR-binding peptide
  VARIANT 6..7: note = Xaa is C or S
GSAGPXXTPTKMSATSMLYY

SEQ ID NO: 5179 - protein, 16 aa, synthetic construct
  REGION 1..16: note = GFR-binding peptide
  VARIANT 2..3: note = Xaa is C or S
PXXVPEKMSPINILYF

SEQ ID NO: 5180 - protein, 18 aa, synthetic construct
  REGION 1..18: note = GFR-binding peptide
  VARIANT 4..5: note = Xaa is C or S
ASPXXVPQDLEPISILYL

SEQ ID NO: 5181 - protein, 11 aa, synthetic construct
  REGION 1..11: note = GFR-binding peptide
QDLSPINILYF

SEQ ID NO: 5182 - protein, 13 aa, synthetic construct
  REGION 1..13: note = GFR-binding peptide
VPTRLSPISILYK

SEQ ID NO: 5183 - protein, 16 aa, synthetic construct
  REGION 1..16: note = GFR-binding peptide
  VARIANT 2..3: note = Xaa is C or S
AXXVPTKLSPINVLYF

SEQ ID NO: 5184 - protein, 17 aa, synthetic construct
  REGION 1..17: note = GFR-binding peptide
  VARIANT 3..4: note = Xaa is C or S
KAXXVPTELEPISMLYL

SEQ ID NO: 5185 - protein, 12 aa, synthetic construct
  REGION 1..12: note = GFR-binding peptide
PARLSPISILYK

SEQ ID NO: 5186 - protein, 19 aa, synthetic construct
  REGION 1..19: note = GFR-binding peptide
  VARIANT 5..6: note = Xaa is C or S
ASKAXXVPTKLSATSILYY

SEQ ID NO: 5187 - protein, 15 aa, synthetic construct
  REGION 1..15: note = GFR-binding peptide
  VARIANT 2: note = Xaa is C or S
TXAPTKLSPISVLYK

SEQ ID NO: 5188 - protein, 16 aa, synthetic construct
  REGION 1..16: note = GFR-binding peptide
  VARIANT 2..3: note = Xaa is C or S
AXXVPTKLSPINILYF

SEQ ID NO: 5189 - protein, 14 aa, synthetic construct
  REGION 1..14: note = GFR-binding peptide
  VARIANT 1: note = Xaa is C or S
XVSQDLNAISILYF

SEQ ID NO: 5190 - protein, 13 aa, synthetic construct
  REGION 1..13: note = GFR-binding peptide
APTKLEPISVLYL

SEQ ID NO: 5191 - protein, 15 aa, synthetic construct
  REGION 1..15: note = GFR-binding peptide
  VARIANT 1..2: note = Xaa is C or S
XXVPTELSPISMLYK

SEQ ID NO: 5192 - protein, 14 aa, synthetic construct
  REGION 1..14: note = GFR-binding peptide
  VARIANT 1: note = Xaa is C or S
XVPQDLNAISILYF

SEQ ID NO: 5193 - protein, 13 aa, synthetic construct
  REGION 1..13: note = GFR-binding peptide
VPQDLNAISILYF

SEQ ID NO: 5194 - protein, 12 aa, synthetic construct
  REGION 1..12: note = GFR-binding peptide
SQDLSPINILYF

SEQ ID NO: 5195 - protein, 15 aa, synthetic construct
  REGION 1..15: note = GFR-binding peptide
  VARIANT 1..2: note = Xaa is C or S
XXVSQDLSATSILYY

SEQ ID NO: 5196 - protein, 15 aa, synthetic construct
  REGION 1..15: note = GFR-binding peptide
  VARIANT 1..2: note = Xaa is C or S
XXAPTKLSPINVLYF

SEQ ID NO: 5197 - protein, 16 aa, synthetic construct
  REGION 1..16: note = GFR-binding peptide
  VARIANT 2..3: note = Xaa is C or S
AXXVPTKLNAISVLYF

SEQ ID NO: 5198 - protein, 13 aa, synthetic construct
  REGION 1..13: note = GFR-binding peptide
APVKTSPISMLYK

SEQ ID NO: 5199 - protein, 16 aa, synthetic construct
  REGION 1..16: note = GFR-binding peptide
  VARIANT 2..3: note = Xaa is C or S
PXXVSQDLSPISILYK

SEQ ID NO: 5200 - protein, 14 aa, synthetic construct
  REGION 1..14: note = GFR-binding peptide
  VARIANT 1: note = Xaa is C or S
XAPTKLEPISVLYL

SEQ ID NO: 5201 - protein, 10 aa, synthetic construct
  REGION 1..10: note = GFR-binding peptide
DLNAISILYF

SEQ ID NO: 5202 - protein, 18 aa, synthetic construct
  REGION 1..18: note = GFR-binding peptide
  VARIANT 4..5: note = Xaa is C or S
PSTXXAPVKTNAISMLYF

SEQ ID NO: 5203 - protein, 17 aa, synthetic construct
  REGION 1..17: note = GFR-binding peptide
  VARIANT 3..4: note = Xaa is C or S
STXXAPVKTSPINMLYF

SEQ ID NO: 5204 - protein, 20 aa, synthetic construct
  REGION 1..20: note = GFR-binding peptide
  VARIANT 6..7: note = Xaa is C or S
ASAAPXXVPQALSPINILYF

SEQ ID NO: 5205 - protein, 18 aa, synthetic construct
  REGION 1..18: note = GFR-binding peptide
  VARIANT 4..5: note = Xaa is C or S
SKAXXVPTKLSPISILYK

SEQ ID NO: 5206 - protein, 16 aa, synthetic construct
  REGION 1..16: note = GFR-binding peptide
  VARIANT 2..3: note = Xaa is C or S
PXXAPTQLSPINVLYF

SEQ ID NO: 5207 - protein, 18 aa, synthetic construct
  REGION 1..18: note = GFR-binding peptide
  VARIANT 4..5: note = Xaa is C or S
ASPXXVSQDLNAISILYF

SEQ ID NO: 5208 - protein, 18 aa, synthetic construct
  REGION 1..18: note = GFR-binding peptide
  VARIANT 4..5: note = Xaa is C or S
PKAXXAPTKLSPINVLYF

SEQ ID NO: 5209 - protein, 19 aa, synthetic construct
  REGION 1..19: note = GFR-binding peptide
  VARIANT 5..6: note = Xaa is C or S
APASXXVPARLSPINILYF

SEQ ID NO: 5210 - protein, 14 aa, synthetic construct
  REGION 1..14: note = GFR-binding peptide
  VARIANT 1: note = Xaa is C or S
XVPARLSPISILYK

SEQ ID NO: 5211 - protein, 12 aa, synthetic construct
  REGION 1..12: note = GFR-binding peptide
PVKTNAISMLYF

SEQ ID NO: 5212 - protein, 11 aa, synthetic construct
  REGION 1..11: note = GFR-binding peptide
TRLSPISILYK

SEQ ID NO: 5213 - protein, 20 aa, synthetic construct
  REGION 1..20: note = GFR-binding peptide
  VARIANT 6..7: note = Xaa is C or S
KIPKAXXVPTELEPISMLYL

SEQ ID NO: 5214 - protein, 14 aa, synthetic construct
  REGION 1..14: note = GFR-binding peptide
  VARIANT 1: note = Xaa is C or S
XTPTKMNAISMLYF

SEQ ID NO: 5215 - protein, 16 aa, synthetic construct
  REGION 1..16: note = GFR-binding peptide
  VARIANT 2..3: note = Xaa is C or S
AXXVPTKLEPISVLYL

SEQ ID NO: 5216 - protein, 12 aa, synthetic construct
  REGION 1..12: note = GFR-binding peptide
PTQLSATSVLYY

SEQ ID NO: 5217 - protein, 18 aa, synthetic construct
  REGION 1..18: note = GFR-binding peptide
  VARIANT 4..5: note = Xaa is C or S
PKPXXAPTQLEPISVLYL

SEQ ID NO: 5218 - protein, 17 aa, synthetic construct
  REGION 1..17: note = GFR-binding peptide
  VARIANT 3..4: note = Xaa is C or S
KAXXVPTKLNAISILYF

SEQ ID NO: 5219 - protein, 17 aa, synthetic construct
  REGION 1..17: note = GFR-binding peptide
  VARIANT 3..4: note = Xaa is C or S
KPXXAPTKLSPINVLYF

SEQ ID NO: 5220 - protein, 17 aa, synthetic construct
  REGION 1..17: note = GFR-binding peptide
  VARIANT 3..4: note = Xaa is C or S
PTXXVPTRLSPISILYK

SEQ ID NO: 5221 - protein, 19 aa, synthetic construct
  REGION 1..19: note = GFR-binding peptide
  VARIANT 5..6: note = Xaa is C or S
VGKAXXVPTKLSPINVLYF

SEQ ID NO: 5222 - protein, 20 aa, synthetic construct
  REGION 1..20: note = GFR-binding peptide
  VARIANT 6..7: note = Xaa is C or S
AAPASXXVPARLSPISILYK

SEQ ID NO: 5223 - protein, 19 aa, synthetic construct
  REGION 1..19: note = GFR-binding peptide
  VARIANT 5..6: note = Xaa is C or S
SAGPXXTPTKMSPISMLYK

SEQ ID NO: 5224 - protein, 16 aa, synthetic construct
  REGION 1..16: note = GFR-binding peptide
  VARIANT 2..3: note = Xaa is C or S
SXXVPARLEPISILYL

SEQ ID NO: 5225 - protein, 11 aa, synthetic construct
  REGION 1..11: note = GFR-binding peptide
TKLNAISILYF

SEQ ID NO: 5226 - protein, 20 aa, synthetic construct
  REGION 1..20: note = GFR-binding peptide
  VARIANT 7: note = Xaa is C or S
HVTKPTXAPTKLSPINVLYF

SEQ ID NO: 5227 - protein, 19 aa, synthetic construct
  REGION 1..19: note = GFR-binding peptide
  VARIANT 5..6: note = Xaa is C or S
IPKAXXVPTELSATSMLYY

SEQ ID NO: 5228 - protein, 19 aa, synthetic construct
  REGION 1..19: note = GFR-binding peptide
  VARIANT 6: note = Xaa is C or S
VTKPTXAPTKLEPISVLYL

SEQ ID NO: 5229 - protein, 9 aa, synthetic construct
  REGION 1..9: note = GFR-binding peptide
LNAISILYF

SEQ ID NO: 5230 - protein, 9 aa, synthetic construct
  REGION 1..9: note = GFR-binding peptide
MSATSMLYY

SEQ ID NO: 5231 - protein, 17 aa, synthetic construct
  REGION 1..17: note = GFR-binding peptide
  VARIANT 3..4: note = Xaa is C or S
SPXXVSQDLSPISILYK

SEQ ID NO: 5232 - protein, 16 aa, synthetic construct
  REGION 1..16: note = GFR-binding peptide
  VARIANT 2..3: note = Xaa is C or S
PXXVPEKMEPISILYL

SEQ ID NO: 5233 - protein, 14 aa, synthetic construct
  REGION 1..14: note = GFR-binding peptide
  VARIANT 1: note = Xaa is C or S
XVPQALNAISILYF

SEQ ID NO: 5234 - protein, 19 aa, synthetic construct
  REGION 1..19: note = GFR-binding peptide
  VARIANT 5..6: note = Xaa is C or S
IPEPXXVPEKMSPINILYF

SEQ ID NO: 5235 - protein, 15 aa, synthetic construct
  REGION 1..15: note = GFR-binding peptide
  VARIANT 1..2: note = Xaa is C or S
XXTPTKMSATSMLYY

SEQ ID NO: 5236 - protein, 20 aa, synthetic construct
  REGION 1..20: note = GFR-binding peptide
  VARIANT 6..7: note = Xaa is C or S
GSAGPXXTPTKMEPISMLYL

SEQ ID NO: 5237 - protein, 20 aa, synthetic construct
  REGION 1..20: note = GFR-binding peptide
  VARIANT 6..7: note = Xaa is C or S
AAPASXXVPARLNAISILYF

SEQ ID NO: 5238 - protein, 13 aa, synthetic construct
  REGION 1..13: note = GFR-binding peptide
VPTRLSPINILYF

SEQ ID NO: 5239 - protein, 18 aa, synthetic construct
  REGION 1..18: note = GFR-binding peptide
  VARIANT 4..5: note = Xaa is C or S
ASPXXVSQDLEPISILYL

SEQ ID NO: 5240 - protein, 10 aa, synthetic construct
  REGION 1..10: note = GFR-binding peptide
ELEPISMLYL

SEQ ID NO: 5241 - protein, 19 aa, synthetic construct
  REGION 1..19: note = GFR-binding peptide
  VARIANT 5..6: note = Xaa is C or S
IPKAXXVPTELSPISMLYK

SEQ ID NO: 5242 - protein, 17 aa, synthetic construct
  REGION 1..17: note = GFR-binding peptide
  VARIANT 3..4: note = Xaa is C or S
ASXXVPARLSPISILYK

SEQ ID NO: 5243 - protein, 11 aa, synthetic construct
  REGION 1..11: note = GFR-binding peptide
TKMEPISMLYL

SEQ ID NO: 5244 - protein, 12 aa, synthetic construct
  REGION 1..12: note = GFR-binding peptide
PTELNAISMLYF

SEQ ID NO: 5245 - protein, 12 aa, synthetic construct
  REGION 1..12: note = GFR-binding peptide
PQALEPISILYL

SEQ ID NO: 5246 - protein, 15 aa, synthetic construct
  REGION 1..15: note = GFR-binding peptide
  VARIANT 1..2: note = Xaa is C or S
XXVPQALSPINILYF

SEQ ID NO: 5247 - protein, 12 aa, synthetic construct
  REGION 1..12: note = GFR-binding peptide
PTKLSPISILYK

SEQ ID NO: 5248 - protein, 17 aa, synthetic construct
  REGION 1..17: note = GFR-binding peptide
  VARIANT 3..4: note = Xaa is C or S
SPXXVPQDLSATSILYY

SEQ ID NO: 5249 - protein, 20 aa, synthetic construct
  REGION 1..20: note = GFR-binding peptide
  VARIANT 6..7: note = Xaa is C or S
TVPKPXXAPTQLSPINVLYF

SEQ ID NO: 5250 - protein, 16 aa, synthetic construct
  REGION 1..16: note = GFR-binding peptide
  VARIANT 2..3: note = Xaa is C or S
AXXVPTELSPISMLYK

SEQ ID NO: 5251 - protein, 18 aa, synthetic construct
  REGION 1..18: note = GFR-binding peptide
  VARIANT 4..5: note = Xaa is C or S
ASPXXVPQDLSPINILYF

SEQ ID NO: 5252 - protein, 18 aa, synthetic construct
  REGION 1..18: note = GFR-binding peptide
  VARIANT 4..5: note = Xaa is C or S
PSTXXAPVKTSATSMLYY

SEQ ID NO: 5253 - protein, 18 aa, synthetic construct
  REGION 1..18: note = GFR-binding peptide
  VARIANT 5: note = Xaa is C or S
TKPTXAPTKLSATSVLYY

SEQ ID NO: 5254 - protein, 13 aa, synthetic construct
  REGION 1..13: note = GFR-binding peptide
VPTELSPISMLYK

SEQ ID NO: 5255 - protein, 11 aa, synthetic construct
  REGION 1..11: note = GFR-binding peptide
ARLSPISILYK

SEQ ID NO: 5256 - protein, 13 aa, synthetic construct
  REGION 1..13: note = GFR-binding peptide
VPEKMEPISILYL

SEQ ID NO: 5257 - protein, 13 aa, synthetic construct
  REGION 1..13: note = GFR-binding peptide
VPTKLNAISVLYF

SEQ ID NO: 5258 - protein, 14 aa, synthetic construct
  REGION 1..14: note = GFR-binding peptide
  VARIANT 1: note = Xaa is C or S
XVSQDLSPISILYK

SEQ ID NO: 5259 - protein, 18 aa, synthetic construct
  REGION 1..18: note = GFR-binding peptide
  VARIANT 4..5: note = Xaa is C or S
PASXXVPARLSATSILYY

SEQ ID NO: 5260 - protein, 19 aa, synthetic construct
  REGION 1..19: note = GFR-binding peptide
  VARIANT 5..6: note = Xaa is C or S
VPKAXXAPTKLNAISVLYF

SEQ ID NO: 5261 - protein, 19 aa, synthetic construct
  REGION 1..19: note = GFR-binding peptide
  VARIANT 5..6: note = Xaa is C or S
SASPXXVPQDLNAISILYF

SEQ ID NO: 5262 - protein, 19 aa, synthetic construct
  REGION 1..19: note = GFR-binding peptide
  VARIANT 5..6: note = Xaa is C or S
VPKAXXAPTKLSPISVLYK

SEQ ID NO: 5263 - protein, 16 aa, synthetic construct
  REGION 1..16: note = GFR-binding peptide
  VARIANT 2..3: note = Xaa is C or S
AXXVPTELNAISMLYF

SEQ ID NO: 5264 - protein, 17 aa, synthetic construct
  REGION 1..17: note = GFR-binding peptide
  VARIANT 3..4: note = Xaa is C or S
APXXVPQALSATSILYY

SEQ ID NO: 5265 - protein, 11 aa, synthetic construct
  REGION 1..11: note = GFR-binding peptide
ARLNAISILYF

SEQ ID NO: 5266 - protein, 9 aa, synthetic construct
  REGION 1..9: note = GFR-binding peptide
MSPINILYF

SEQ ID NO: 5267 - protein, 10 aa, synthetic construct
  REGION 1..10: note = GFR-binding peptide
KTSPINMLYF

SEQ ID NO: 5268 - protein, 18 aa, synthetic construct
  REGION 1..18: note = GFR-binding peptide
  VARIANT 4..5: note = Xaa is C or S
PPTXXVPTRLSPINILYF

SEQ ID NO: 5269 - protein, 18 aa, synthetic construct
  REGION 1..18: note = GFR-binding peptide
  VARIANT 4..5: note = Xaa is C or S
AAPXXVPQALSPINILYF

SEQ ID NO: 5270 - protein, 16 aa, synthetic construct
  REGION 1..16: note = GFR-binding peptide
  VARIANT 2..3: note = Xaa is C or S
AXXVPTKLSPISILYK

SEQ ID NO: 5271 - protein, 16 aa, synthetic construct
  REGION 1..16: note = GFR-binding peptide
  VARIANT 2..3: note = Xaa is C or S
AXXAPTKLSPINVLYF

SEQ ID NO: 5272 - protein, 15 aa, synthetic construct
  REGION 1..15: note = GFR-binding peptide
  VARIANT 1..2: note = Xaa is C or S
XXVPEKMSPINILYF

SEQ ID NO: 5273 - protein, 13 aa, synthetic construct
  REGION 1..13: note = GFR-binding peptide
VPQALEPISILYL

SEQ ID NO: 5274 - protein, 13 aa, synthetic construct
  REGION 1..13: note = GFR-binding peptide
VPARLSPINILYF

SEQ ID NO: 5275 - protein, 15 aa, synthetic construct
  REGION 1..15: note = GFR-binding peptide
  VARIANT 1..2: note = Xaa is C or S
XXVPARLEPISILYL

SEQ ID NO: 5276 - protein, 16 aa, synthetic construct
  REGION 1..16: note = GFR-binding peptide
  VARIANT 2..3: note = Xaa is C or S
AXXVPTKLSATSILYY

SEQ ID NO: 5277 - protein, 19 aa, synthetic construct
  REGION 1..19: note = GFR-binding peptide
  VARIANT 5..6: note = Xaa is C or S
SAGPXXTPTKMSATSMLYY

SEQ ID NO: 5278 - protein, 18 aa, synthetic construct
  REGION 1..18: note = GFR-binding peptide
  VARIANT 4..5: note = Xaa is C or S
PKAXXAPTKLEPISVLYL

SEQ ID NO: 5279 - protein, 12 aa, synthetic construct
  REGION 1..12: note = GFR-binding peptide
PEKMSATSILYY

SEQ ID NO: 5280 - protein, 19 aa, synthetic construct
  REGION 1..19: note = GFR-binding peptide
  VARIANT 5..6: note = Xaa is C or S
ASKAXXVPTKLSPISILYK

SEQ ID NO: 5281 - protein, 12 aa, synthetic construct
  REGION 1..12: note = GFR-binding peptide
PTRLSPINILYF

SEQ ID NO: 5282 - protein, 11 aa, synthetic construct
  REGION 1..11: note = GFR-binding peptide
EKMSPINILYF

SEQ ID NO: 5283 - protein, 11 aa, synthetic construct
  REGION 1..11: note = GFR-binding peptide
VKTSPINMLYF

SEQ ID NO: 5284 - protein, 17 aa, synthetic construct
  REGION 1..17: note = GFR-binding peptide
  VARIANT 3..4: note = Xaa is C or S
KPXXAPTKLSATSVLYY

SEQ ID NO: 5285 - protein, 18 aa, synthetic construct
  REGION 1..18: note = GFR-binding peptide
  VARIANT 4..5: note = Xaa is C or S
GKAXXVPTKLSPINVLYF

SEQ ID NO: 5286 - protein, 19 aa, synthetic construct
  REGION 1..19: note = GFR-binding peptide
  VARIANT 5..6: note = Xaa is C or S
VPSTXXAPVKTSPINMLYF

SEQ ID NO: 5287 - protein, 15 aa, synthetic construct
  REGION 1..15: note = GFR-binding peptide
  VARIANT 1..2: note = Xaa is C or S
XXAPTQLSPINVLYF

SEQ ID NO: 5288 - protein, 13 aa, synthetic construct
  REGION 1..13: note = GFR-binding peptide
TPTKMNAISMLYF

SEQ ID NO: 5289 - protein, 11 aa, synthetic construct
  REGION 1..11: note = GFR-binding peptide
TRLSATSILYY

SEQ ID NO: 5290 - protein, 20 aa, synthetic construct
  REGION 1..20: note = GFR-binding peptide
  VARIANT 6..7: note = Xaa is C or S
RVPSTXXAPVKTNAISMLYF

SEQ ID NO: 5291 - protein, 16 aa, synthetic construct
  REGION 1..16: note = GFR-binding peptide
  VARIANT 2..3: note = Xaa is C or S
AXXAPTKLSPISVLYK

SEQ ID NO: 5292 - protein, 12 aa, synthetic construct
  REGION 1..12: note = GFR-binding peptide
SQDLEPISILYL

SEQ ID NO: 5293 - protein, 20 aa, synthetic construct
  REGION 1..20: note = GFR-binding peptide
  VARIANT 6..7: note = Xaa is C or S
GIPEPXXVPEKMSPISILYK

SEQ ID NO: 5294 - protein, 14 aa, synthetic construct
  REGION 1..14: note = GFR-binding peptide
  VARIANT 1: note = Xaa is C or S
XVPTRLNAISILYF

SEQ ID NO: 5295 - protein, 12 aa, synthetic construct
  REGION 1..12: note = GFR-binding peptide
PTKLNAISILYF

SEQ ID NO: 5296 - protein, 14 aa, synthetic construct
  REGION 1..14: note = GFR-binding peptide
  VARIANT 1: note = Xaa is C or S
XAPVKTSPINMLYF

SEQ ID NO: 5297 - protein, 10 aa, synthetic construct
  REGION 1..10: note = GFR-binding peptide
RLSATSILYY

SEQ ID NO: 5298 - protein, 15 aa, synthetic construct
  REGION 1..15: note = GFR-binding peptide
  VARIANT 1..2: note = Xaa is C or S
XXVSQDLSPINILYF

SEQ ID NO: 5299 - protein, 9 aa, synthetic construct
  REGION 1..9: note = GFR-binding peptide
MSPISMLYK

SEQ ID NO: 5300 - protein, 15 aa, synthetic construct
  REGION 1..15: note = GFR-binding peptide
  VARIANT 1..2: note = Xaa is C or S
XXVPQDLSATSILYY

SEQ ID NO: 5301 - protein, 10 aa, synthetic construct
  REGION 1..10: note = GFR-binding peptide
ALEPISILYL

SEQ ID NO: 5302 - protein, 9 aa, synthetic construct
  REGION 1..9: note = GFR-binding peptide
TSATSMLYY

SEQ ID NO: 5303 - protein, 16 aa, synthetic construct
  REGION 1..16: note = GFR-binding peptide
  VARIANT 2..3: note = Xaa is C or S
PXXVPQALSPINILYF

SEQ ID NO: 5304 - protein, 13 aa, synthetic construct
  REGION 1..13: note = GFR-binding peptide
VSQDLNAISILYF

SEQ ID NO: 5305 - protein, 16 aa, synthetic construct
  REGION 1..16: note = GFR-binding peptide
  VARIANT 2..3: note = Xaa is C or S
PXXVPQDLSPISILYK

SEQ ID NO: 5306 - protein, 15 aa, synthetic construct
  REGION 1..15: note = GFR-binding peptide
  VARIANT 1..2: note = Xaa is C or S
XXVSQDLSPISILYK

SEQ ID NO: 5307 - protein, 18 aa, synthetic construct
  REGION 1..18: note = GFR-binding peptide
  VARIANT 4..5: note = Xaa is C or S
PASXXVPARLSPISILYK

SEQ ID NO: 5308 - protein, 11 aa, synthetic construct
  REGION 1..11: note = GFR-binding peptide
QALSPISILYK

SEQ ID NO: 5309 - protein, 19 aa, synthetic construct
  REGION 1..19: note = GFR-binding peptide
  VARIANT 5..6: note = Xaa is C or S
TPPTXXVPTRLSPINILYF

SEQ ID NO: 5310 - protein, 17 aa, synthetic construct
  REGION 1..17: note = GFR-binding peptide
  VARIANT 4: note = Xaa is C or S
KPTXAPTKLSPISVLYK

SEQ ID NO: 5311 - protein, 14 aa, synthetic construct
  REGION 1..14: note = GFR-binding peptide
  VARIANT 1: note = Xaa is C or S
XVSQDLSATSILYY

SEQ ID NO: 5312 - protein, 19 aa, synthetic construct
  REGION 1..19: note = GFR-binding peptide
  VARIANT 5..6: note = Xaa is C or S
ASKAXXVPTKLSPINILYF

SEQ ID NO: 5313 - protein, 13 aa, synthetic construct
  REGION 1..13: note = GFR-binding peptide
VPTELSATSMLYY

SEQ ID NO: 5314 - protein, 11 aa, synthetic construct
  REGION 1..11: note = GFR-binding peptide
VKTSPISMLYK

SEQ ID NO: 5315 - protein, 20 aa, synthetic construct
  REGION 1..20: note = GFR-binding peptide
  VARIANT 6..7: note = Xaa is C or S
AVPKAXXAPTKLEPISVLYL

SEQ ID NO: 5316 - protein, 15 aa, synthetic construct
  REGION 1..15: note = GFR-binding peptide
  VARIANT 1..2: note = Xaa is C or S
XXVPQALSPISILYK

SEQ ID NO: 5317 - protein, 12 aa, synthetic construct
  REGION 1..12: note = GFR-binding peptide
PEKMEPISILYL

SEQ ID NO: 5318 - protein, 18 aa, synthetic construct
  REGION 1..18: note = GFR-binding peptide
  VARIANT 4..5: note = Xaa is C or S
PSTXXAPVKTSPISMLYK

SEQ ID NO: 5319 - protein, 14 aa, synthetic construct
  REGION 1..14: note = GFR-binding peptide
  VARIANT 1: note = Xaa is C or S
XVPTKLSPINILYF

SEQ ID NO: 5320 - protein, 12 aa, synthetic construct
  REGION 1..12: note = GFR-binding peptide
PTKLEPISVLYL

SEQ ID NO: 5321 - protein, 15 aa, synthetic construct
  REGION 1..15: note = GFR-binding peptide
  VARIANT 1..2: note = Xaa is C or S
XXAPVKTSPINMLYF

SEQ ID NO: 5322 - protein, 14 aa, synthetic construct
  REGION 1..14: note = GFR-binding peptide
  VARIANT 1: note = Xaa is C or S
XAPTQLSPINVLYF

SEQ ID NO: 5323 - protein, 16 aa, synthetic construct
  REGION 1..16: note = GFR-binding peptide
  VARIANT 2..3: note = Xaa is C or S
AXXVPTELSATSMLYY

SEQ ID NO: 5324 - protein, 10 aa, synthetic construct
  REGION 1..10: note = GFR-binding peptide
KMSPINILYF

SEQ ID NO: 5325 - protein, 19 aa, synthetic construct
  REGION 1..19: note = GFR-binding peptide
  VARIANT 5..6: note = Xaa is C or S
SASPXXVSQDLNAISILYF

SEQ ID NO: 5326 - protein, 19 aa, synthetic construct
  REGION 1..19: note = GFR-binding peptide
  VARIANT 5..6: note = Xaa is C or S
IPKAXXVPTELSPINMLYF

SEQ ID NO: 5327 - protein, 17 aa, synthetic construct
  REGION 1..17: note = GFR-binding peptide
  VARIANT 4: note = Xaa is C or S
KPTXAPTKLSATSVLYY

SEQ ID NO: 5328 - protein, 11 aa, synthetic construct
  REGION 1..11: note = GFR-binding peptide
TKMSATSMLYY

SEQ ID NO: 5329 - protein, 18 aa, synthetic construct
  REGION 1..18: note = GFR-binding peptide
  VARIANT 4..5: note = Xaa is C or S
AAPXXVPQALSPISILYK

SEQ ID NO: 5330 - protein, 14 aa, synthetic construct
  REGION 1..14: note = GFR-binding peptide
  VARIANT 1: note = Xaa is C or S
XVPARLEPISILYL

SEQ ID NO: 5331 - protein, 20 aa, synthetic construct
  REGION 1..20: note = GFR-binding peptide
  VARIANT 6..7: note = Xaa is C or S
RVPSTXXAPVKTEPISMLYL

SEQ ID NO: 5332 - protein, 13 aa, synthetic construct
  REGION 1..13: note = GFR-binding peptide
VPTKLSATSVLYY

SEQ ID NO: 5333 - protein, 11 aa, synthetic construct
  REGION 1..11: note = GFR-binding peptide
TELSPINMLYF

SEQ ID NO: 5334 - protein, 17 aa, synthetic construct
  REGION 1..17: note = GFR-binding peptide
  VARIANT 3..4: note = Xaa is C or S
PTXXVPTRLSPINILYF

SEQ ID NO: 5335 - protein, 9 aa, synthetic construct
  REGION 1..9: note = GFR-binding peptide
LSPINMLYF

SEQ ID NO: 5336 - protein, 14 aa, synthetic construct
  REGION 1..14: note = GFR-binding peptide
  VARIANT 1: note = Xaa is C or S
XTPTKMSATSMLYY

SEQ ID NO: 5337 - protein, 10 aa, synthetic construct
  REGION 1..10: note = GFR-binding peptide
KLNAISILYF

SEQ ID NO: 5338 - protein, 18 aa, synthetic construct
  REGION 1..18: note = GFR-binding peptide
  VARIANT 4..5: note = Xaa is C or S
PKAXXVPTELSPINMLYF

SEQ ID NO: 5339 - protein, 18 aa, synthetic construct
  REGION 1..18: note = GFR-binding peptide
  VARIANT 4..5: note = Xaa is C or S
PKPXXAPTQLSPISVLYK

SEQ ID NO: 5340 - protein, 13 aa, synthetic construct
  REGION 1..13: note = GFR-binding peptide
APTQLSPISVLYK

SEQ ID NO: 5341 - protein, 16 aa, synthetic construct
  REGION 1..16: note = GFR-binding peptide
  VARIANT 2..3: note = Xaa is C or S
TXXAPVKTSATSMLYY

SEQ ID NO: 5342 - protein, 12 aa, synthetic construct
  REGION 1..12: note = GFR-binding peptide
PTKLSATSILYY

SEQ ID NO: 5343 - protein, 15 aa, synthetic construct
  REGION 1..15: note = GFR-binding peptide
  VARIANT 1..2: note = Xaa is C or S
XXTPTKMSPISMLYK

SEQ ID NO: 5344 - protein, 13 aa, synthetic construct
  REGION 1..13: note = GFR-binding peptide
VPTKLSPISILYK

SEQ ID NO: 5345 - protein, 14 aa, synthetic construct
  REGION 1..14: note = GFR-binding peptide
  VARIANT 1: note = Xaa is C or S
XVPQALSATSILYY

SEQ ID NO: 5346 - protein, 10 aa, synthetic construct
  REGION 1..10: note = GFR-binding peptide
RLSPISILYK

SEQ ID NO: 5347 - protein, 16 aa, synthetic construct
  REGION 1..16: note = GFR-binding peptide
  VARIANT 2..3: note = Xaa is C or S
PXXVSQDLSPINILYF

SEQ ID NO: 5348 - protein, 20 aa, synthetic construct
  REGION 1..20: note = GFR-binding peptide
  VARIANT 6..7: note = Xaa is C or S
ASAAPXXVPQALSATSILYY

SEQ ID NO: 5349 - protein, 17 aa, synthetic construct
  REGION 1..17: note = GFR-binding peptide
  VARIANT 3..4: note = Xaa is C or S
STXXAPVKTSATSMLYY

SEQ ID NO: 5350 - protein, 18 aa, synthetic construct
  REGION 1..18: note = GFR-binding peptide
  VARIANT 4..5: note = Xaa is C or S
PKPXXAPTKLSATSVLYY

SEQ ID NO: 5351 - protein, 13 aa, synthetic construct
  REGION 1..13: note = GFR-binding peptide
VSQDLEPISILYL

SEQ ID NO: 5352 - protein, 14 aa, synthetic construct
  REGION 1..14: note = GFR-binding peptide
  VARIANT 1: note = Xaa is C or S
XVPTELSPINMLYF

SEQ ID NO: 5353 - protein, 14 aa, synthetic construct
  REGION 1..14: note = GFR-binding peptide
  VARIANT 1: note = Xaa is C or S
XVPQDLSPISILYK

SEQ ID NO: 5354 - protein, 19 aa, synthetic construct
  REGION 1..19: note = GFR-binding peptide
  VARIANT 5..6: note = Xaa is C or S
VPKPXXAPTQLSPINVLYF

SEQ ID NO: 5355 - protein, 13 aa, synthetic construct
  REGION 1..13: note = GFR-binding peptide
VPEKMSATSILYY

SEQ ID NO: 5356 - protein, 19 aa, synthetic construct
  REGION 1..19: note = GFR-binding peptide
  VARIANT 5..6: note = Xaa is C or S
SAGPXXTPTKMEPISMLYL

SEQ ID NO: 5357 - protein, 10 aa, synthetic construct
  REGION 1..10: note = GFR-binding peptide
QLEPISVLYL

SEQ ID NO: 5358 - protein, 15 aa, synthetic construct
  REGION 1..15: note = GFR-binding peptide
  VARIANT 1..2: note = Xaa is C or S
XXVPQDLSPISILYK

SEQ ID NO: 5359 - protein, 18 aa, synthetic construct
  REGION 1..18: note = GFR-binding peptide
  VARIANT 4..5: note = Xaa is C or S
SKAXXVPTKLSPINILYF

SEQ ID NO: 5360 - protein, 13 aa, synthetic construct
  REGION 1..13: note = GFR-binding peptide
VPTELNAISMLYF

SEQ ID NO: 5361 - protein, 19 aa, synthetic construct
  REGION 1..19: note = GFR-binding peptide
  VARIANT 5..6: note = Xaa is C or S
SAGPXXTPTKMNAISMLYF

SEQ ID NO: 5362 - protein, 20 aa, synthetic construct
  REGION 1..20: note = GFR-binding peptide
  VARIANT 6..7: note = Xaa is C or S
ASAAPXXVPQALSPISILYK

SEQ ID NO: 5363 - protein, 18 aa, synthetic construct
  REGION 1..18: note = GFR-binding peptide
  VARIANT 4..5: note = Xaa is C or S
PKPXXAPTQLSATSVLYY

SEQ ID NO: 5364 - protein, 17 aa, synthetic construct
  REGION 1..17: note = GFR-binding peptide
  VARIANT 3..4: note = Xaa is C or S
KPXXAPTQLSATSVLYY

SEQ ID NO: 5365 - protein, 15 aa, synthetic construct
  REGION 1..15: note = GFR-binding peptide
  VARIANT 1..2: note = Xaa is C or S
XXVPTKLSPINVLYF

SEQ ID NO: 5366 - protein, 15 aa, synthetic construct
  REGION 1..15: note = GFR-binding peptide
  VARIANT 1..2: note = Xaa is C or S
XXVPTRLNAISILYF

SEQ ID NO: 5367 - protein, 19 aa, synthetic construct
  REGION 1..19: note = GFR-binding peptide
  VARIANT 5..6: note = Xaa is C or S
SASPXXVSQDLEPISILYL

SEQ ID NO: 5368 - protein, 16 aa, synthetic construct
  REGION 1..16: note = GFR-binding peptide
  VARIANT 2..3: note = Xaa is C or S
AXXVPTKLSATSVLYY

SEQ ID NO: 5369 - protein, 11 aa, synthetic construct
  REGION 1..11: note = GFR-binding peptide
TRLNAISILYF

SEQ ID NO: 5370 - protein, 17 aa, synthetic construct
  REGION 1..17: note = GFR-binding peptide
  VARIANT 3..4: note = Xaa is C or S
KPXXAPTKLSPISVLYK

SEQ ID NO: 5371 - protein, 12 aa, synthetic construct
  REGION 1..12: note = GFR-binding peptide
PTELEPISMLYL

SEQ ID NO: 5372 - protein, 17 aa, synthetic construct
  REGION 1..17: note = GFR-binding peptide
  VARIANT 3..4: note = Xaa is C or S
KPXXAPTQLSPISVLYK

SEQ ID NO: 5373 - protein, 14 aa, synthetic construct
  REGION 1..14: note = GFR-binding peptide
  VARIANT 1: note = Xaa is C or S
XVPQDLSATSILYY

SEQ ID NO: 5374 - protein, 14 aa, synthetic construct
  REGION 1..14: note = GFR-binding peptide
  VARIANT 1: note = Xaa is C or S
XVPQALSPISILYK

SEQ ID NO: 5375 - protein, 14 aa, synthetic construct
  REGION 1..14: note = GFR-binding peptide
  VARIANT 1: note = Xaa is C or S
XVPARLNAISILYF

SEQ ID NO: 5376 - protein, 12 aa, synthetic construct
  REGION 1..12: note = GFR-binding peptide
PEKMNAISILYF

SEQ ID NO: 5377 - protein, 13 aa, synthetic construct
  REGION 1..13: note = GFR-binding peptide
APVKTEPISMLYL

SEQ ID NO: 5378 - protein, 17 aa, synthetic construct
  REGION 1..17: note = GFR-binding peptide
  VARIANT 3..4: note = Xaa is C or S
SPXXVSQDLSPINILYF

SEQ ID NO: 5379 - protein, 16 aa, synthetic construct
  REGION 1..16: note = GFR-binding peptide
  VARIANT 2..3: note = Xaa is C or S
TXXAPVKTSPISMLYK

SEQ ID NO: 5380 - protein, 9 aa, synthetic construct
  REGION 1..9: note = GFR-binding peptide
TSPISMLYK

SEQ ID NO: 5381 - protein, 18 aa, synthetic construct
  REGION 1..18: note = GFR-binding peptide
  VARIANT 5: note = Xaa is C or S
TKPTXAPTKLSPISVLYK

SEQ ID NO: 5382 - protein, 15 aa, synthetic construct
  REGION 1..15: note = GFR-binding peptide
  VARIANT 2: note = Xaa is C or S
TXAPTKLSPINVLYF

SEQ ID NO: 5383 - protein, 12 aa, synthetic construct
  REGION 1..12: note = GFR-binding peptide
PARLSPINILYF

SEQ ID NO: 5384 - protein, 18 aa, synthetic construct
  REGION 1..18: note = GFR-binding peptide
  VARIANT 4..5: note = Xaa is C or S
PKPXXAPTKLSPISVLYK

SEQ ID NO: 5385 - protein, 13 aa, synthetic construct
  REGION 1..13: note = GFR-binding peptide
APTKLSPISVLYK

SEQ ID NO: 5386 - protein, 13 aa, synthetic construct
  REGION 1..13: note = GFR-binding peptide
APVKTNAISMLYF

SEQ ID NO: 5387 - protein, 20 aa, synthetic construct
  REGION 1..20: note = GFR-binding peptide
  VARIANT 6..7: note = Xaa is C or S
YVPKPXXAPTKLEPISVLYL

SEQ ID NO: 5388 - protein, 20 aa, synthetic construct
  REGION 1..20: note = GFR-binding peptide
  VARIANT 6..7: note = Xaa is C or S
ASASPXXVPQDLSPINILYF

SEQ ID NO: 5389 - protein, 11 aa, synthetic construct
  REGION 1..11: note = GFR-binding peptide
ARLSATSILYY

SEQ ID NO: 5390 - protein, 13 aa, synthetic construct
  REGION 1..13: note = GFR-binding peptide
VPTKLSATSILYY

SEQ ID NO: 5391 - protein, 19 aa, synthetic construct
  REGION 1..19: note = GFR-binding peptide
  VARIANT 5..6: note = Xaa is C or S
SAAPXXVPQALSPINILYF

SEQ ID NO: 5392 - protein, 20 aa, synthetic construct
  REGION 1..20: note = GFR-binding peptide
  VARIANT 6..7: note = Xaa is C or S
STPPTXXVPTRLSPINILYF

SEQ ID NO: 5393 - protein, 17 aa, synthetic construct
  REGION 1..17: note = GFR-binding peptide
  VARIANT 3..4: note = Xaa is C or S
STXXAPVKTSPISMLYK

SEQ ID NO: 5394 - protein, 13 aa, synthetic construct
  REGION 1..13: note = GFR-binding peptide
APTQLSATSVLYY

SEQ ID NO: 5395 - protein, 15 aa, synthetic construct
  REGION 1..15: note = GFR-binding peptide
  VARIANT 1..2: note = Xaa is C or S
XXVPTRLEPISILYL

SEQ ID NO: 5396 - protein, 12 aa, synthetic construct
  REGION 1..12: note = GFR-binding peptide
PTQLEPISVLYL

SEQ ID NO: 5397 - protein, 14 aa, synthetic construct
  REGION 1..14: note = GFR-binding peptide
  VARIANT 1: note = Xaa is C or S
XTPTKMSPISMLYK

SEQ ID NO: 5398 - protein, 10 aa, synthetic construct
  REGION 1..10: note = GFR-binding peptide
KLEPISVLYL

SEQ ID NO: 5399 - protein, 14 aa, synthetic construct
  REGION 1..14: note = GFR-binding peptide
  VARIANT 1: note = Xaa is C or S
XVPEKMSPINILYF

SEQ ID NO: 5400 - protein, 11 aa, synthetic construct
  REGION 1..11: note = GFR-binding peptide
QDLSNITIQIM

SEQ ID NO: 5401 - protein, 19 aa, synthetic construct
  REGION 1..19: note = GFR-binding peptide
  VARIANT 5..6: note = Xaa is C or S
TPPTXXVPTRLSNITIQIM

SEQ ID NO: 5402 - protein, 13 aa, synthetic construct
  REGION 1..13: note = GFR-binding peptide
VPQALSNITIQIM

SEQ ID NO: 5403 - protein, 18 aa, synthetic construct
  REGION 1..18: note = GFR-binding peptide
  VARIANT 3: note = Xaa is C or S
VQXRPTQVQLSNITVQIM

SEQ ID NO: 5404 - protein, 12 aa, synthetic construct
  REGION 1..12: note = GFR-binding peptide
RVHHSNITVQIM

SEQ ID NO: 5405 - protein, 14 aa, synthetic construct
  REGION 1..14: note = GFR-binding peptide
  VARIANT 1: note = Xaa is C or S
XTPTKMSNITMQIM

SEQ ID NO: 5406 - protein, 10 aa, synthetic construct
  REGION 1..10: note = GFR-binding peptide
QLSNITVQIM

SEQ ID NO: 5407 - protein, 10 aa, synthetic construct
  REGION 1..10: note = GFR-binding peptide
KLSNITVQIM

SEQ ID NO: 5408 - protein, 9 aa, synthetic construct
  REGION 1..9: note = GFR-binding peptide
TSNITMQIM

SEQ ID NO: 5409 - protein, 15 aa, synthetic construct
  REGION 1..15: note = GFR-binding peptide
RPTQVQLSNITVQIM

SEQ ID NO: 5410 - protein, 16 aa, synthetic construct
  REGION 1..16: note = GFR-binding peptide
  VARIANT 2..3: note = Xaa is C or S
TXXAPVKTSNITMQIM

SEQ ID NO: 5411 - protein, 12 aa, synthetic construct
  REGION 1..12: note = GFR-binding peptide
PARLSNITIQIM

SEQ ID NO: 5412 - protein, 20 aa, synthetic construct
  REGION 1..20: note = GFR-binding peptide
  VARIANT 5: note = Xaa is C or S
RNVQXRPTQVQLSNITVQIM

SEQ ID NO: 5413 - protein, 15 aa, synthetic construct
  REGION 1..15: note = GFR-binding peptide
  VARIANT 1..2: note = Xaa is C or S
XXVPQDLSNITIQIM

SEQ ID NO: 5414 - protein, 10 aa, synthetic construct
  REGION 1..10: note = GFR-binding peptide
RLSNITIQIM

SEQ ID NO: 5415 - protein, 13 aa, synthetic construct
  REGION 1..13: note = GFR-binding peptide
APTKLSNITVQIM

SEQ ID NO: 5416 - protein, 20 aa, synthetic construct
  REGION 1..20: note = GFR-binding peptide
  VARIANT 6..7: note = Xaa is C or S
ASAAPXXVPQALSNITIQIM

SEQ ID NO: 5417 - protein, 11 aa, synthetic construct
  REGION 1..11: note = GFR-binding peptide
ARLSNITIQIM

SEQ ID NO: 5418 - protein, 19 aa, synthetic construct
  REGION 1..19: note = GFR-binding peptide
  VARIANT 5..6: note = Xaa is C or S
SASPXXVSQDLSNITIQIM

SEQ ID NO: 5419 - protein, 13 aa, synthetic construct
  REGION 1..13: note = GFR-binding peptide
APVKTSNITMQIM

SEQ ID NO: 5420 - protein, 14 aa, synthetic construct
  REGION 1..14: note = GFR-binding peptide
  VARIANT 1: note = Xaa is C or S
XVPQALSNITIQIM

SEQ ID NO: 5421 - protein, 18 aa, synthetic construct
  REGION 1..18: note = GFR-binding peptide
  VARIANT 4..5: note = Xaa is C or S
AGPXXTPTKMSNITMQIM

SEQ ID NO: 5422 - protein, 13 aa, synthetic construct
  REGION 1..13: note = GFR-binding peptide
TQVQLSNITVQIM

SEQ ID NO: 5423 - protein, 16 aa, synthetic construct
  REGION 1..16: note = GFR-binding peptide
  VARIANT 2..3: note = Xaa is C or S
PXXTPTKMSNITMQIM

SEQ ID NO: 5424 - protein, 11 aa, synthetic construct
  REGION 1..11: note = GFR-binding peptide
VQLSNITVQIM

SEQ ID NO: 5425 - protein, 15 aa, synthetic construct
  REGION 1..15: note = GFR-binding peptide
  VARIANT 1..2: note = Xaa is C or S
XXVPARLSNITIQIM

SEQ ID NO: 5426 - protein, 12 aa, synthetic construct
  REGION 1..12: note = GFR-binding peptide
SQDLSNITIQIM

SEQ ID NO: 5427 - protein, 17 aa, synthetic construct
  REGION 1..17: note = GFR-binding peptide
  VARIANT 2: note = Xaa is C or S
KXQPSRVHHSNITVQIM

SEQ ID NO: 5428 - protein, 16 aa, synthetic construct
  REGION 1..16: note = GFR-binding peptide
  VARIANT 1: note = Xaa is C or S
XRPTQVQLSNITVQIM

SEQ ID NO: 5429 - protein, 14 aa, synthetic construct
  REGION 1..14: note = GFR-binding peptide
PSRVHHSNITVQIM

SEQ ID NO: 5430 - protein, 16 aa, synthetic construct
  REGION 1..16: note = GFR-binding peptide
  VARIANT 2..3: note = Xaa is C or S
PXXVSQDLSNITIQIM

SEQ ID NO: 5431 - protein, 13 aa, synthetic construct
  REGION 1..13: note = GFR-binding peptide
VPTRLSNITIQIM

SEQ ID NO: 5432 - protein, 15 aa, synthetic construct
  REGION 1..15: note = GFR-binding peptide
  VARIANT 1..2: note = Xaa is C or S
XXTPTKMSNITMQIM

SEQ ID NO: 5433 - protein, 16 aa, synthetic construct
  REGION 1..16: note = GFR-binding peptide
  VARIANT 2..3: note = Xaa is C or S
SXXVPARLSNITIQIM

SEQ ID NO: 5434 - protein, 15 aa, synthetic construct
  REGION 1..15: note = GFR-binding peptide
  VARIANT 1..2: note = Xaa is C or S
XXAPVKTSNITMQIM

SEQ ID NO: 5435 - protein, 10 aa, synthetic construct
  REGION 1..10: note = GFR-binding peptide
ALSNITIQIM

SEQ ID NO: 5436 - protein, 19 aa, synthetic construct
  REGION 1..19: note = GFR-binding peptide
  VARIANT 5..6: note = Xaa is C or S
SASPXXVPQDLSNITIQIM

SEQ ID NO: 5437 - protein, 16 aa, synthetic construct
  REGION 1..16: note = GFR-binding peptide
  VARIANT 2..3: note = Xaa is C or S
TXXVPTRLSNITIQIM

SEQ ID NO: 5438 - protein, 15 aa, synthetic construct
  REGION 1..15: note = GFR-binding peptide
  VARIANT 1..2: note = Xaa is C or S
XXVPTRLSNITIQIM

SEQ ID NO: 5439 - protein, 13 aa, synthetic construct
  REGION 1..13: note = GFR-binding peptide
SRVHHSNITVQIM

SEQ ID NO: 5440 - protein, 18 aa, synthetic construct
  REGION 1..18: note = GFR-binding peptide
  VARIANT 4..5: note = Xaa is C or S
PPTXXVPTRLSNITIQIM

SEQ ID NO: 5441 - protein, 10 aa, synthetic construct
  REGION 1..10: note = GFR-binding peptide
KMSNITMQIM

SEQ ID NO: 5442 - protein, 17 aa, synthetic construct
  REGION 1..17: note = GFR-binding peptide
  VARIANT 3..4: note = Xaa is C or S
GPXXTPTKMSNITMQIM

SEQ ID NO: 5443 - protein, 15 aa, synthetic construct
  REGION 1..15: note = GFR-binding peptide
QPSRVHHSNITVQIM

SEQ ID NO: 5444 - protein, 13 aa, synthetic construct
  REGION 1..13: note = GFR-binding peptide
TPTKMSNITMQIM

SEQ ID NO: 5445 - protein, 14 aa, synthetic construct
  REGION 1..14: note = GFR-binding peptide
  VARIANT 1: note = Xaa is C or S
XVPQDLSNITIQIM

SEQ ID NO: 5446 - protein, 12 aa, synthetic construct
  REGION 1..12: note = GFR-binding peptide
PQDLSNITIQIM

SEQ ID NO: 5447 - protein, 16 aa, synthetic construct
  REGION 1..16: note = GFR-binding peptide
  VARIANT 2..3: note = Xaa is C or S
PXXAPTKLSNITVQIM

SEQ ID NO: 5448 - protein, 20 aa, synthetic construct
  REGION 1..20: note = GFR-binding peptide
  VARIANT 5: note = Xaa is C or S
SSVKXQPSRVHHSNITVQIM

SEQ ID NO: 5449 - protein, 15 aa, synthetic construct
  REGION 1..15: note = GFR-binding peptide
  VARIANT 1..2: note = Xaa is C or S
XXAPTKLSNITVQIM

SEQ ID NO: 5450 - protein, 11 aa, synthetic construct
  REGION 1..11: note = GFR-binding peptide
QALSNITIQIM

SEQ ID NO: 5451 - protein, 19 aa, synthetic construct
  REGION 1..19: note = GFR-binding peptide
  VARIANT 5..6: note = Xaa is C or S
VPSTXXAPVKTSNITMQIM

SEQ ID NO: 5452 - protein, 10 aa, synthetic construct
  REGION 1..10: note = GFR-binding peptide
KTSNITMQIM

SEQ ID NO: 5453 - protein, 13 aa, synthetic construct
  REGION 1..13: note = GFR-binding peptide
VPQDLSNITIQIM

SEQ ID NO: 5454 - protein, 11 aa, synthetic construct
  REGION 1..11: note = GFR-binding peptide
VKTSNITMQIM

SEQ ID NO: 5455 - protein, 18 aa, synthetic construct
  REGION 1..18: note = GFR-binding peptide
  VARIANT 4..5: note = Xaa is C or S
AAPXXVPQALSNITIQIM

SEQ ID NO: 5456 - protein, 17 aa, synthetic construct
  REGION 1..17: note = GFR-binding peptide
  VARIANT 3..4: note = Xaa is C or S
ASXXVPARLSNITIQIM

SEQ ID NO: 5457 - protein, 11 aa, synthetic construct
  REGION 1..11: note = GFR-binding peptide
VHHSNITVQIM

SEQ ID NO: 5458 - protein, 13 aa, synthetic construct
  REGION 1..13: note = GFR-binding peptide
VSQDLSNITIQIM

SEQ ID NO: 5459 - protein, 18 aa, synthetic construct
  REGION 1..18: note = GFR-binding peptide
  VARIANT 4..5: note = Xaa is C or S
PSTXXAPVKTSNITMQIM

SEQ ID NO: 5460 - protein, 18 aa, synthetic construct
  REGION 1..18: note = GFR-binding peptide
  VARIANT 3: note = Xaa is C or S
VKXQPSRVHHSNITVQIM

SEQ ID NO: 5461 - protein, 14 aa, synthetic construct
  REGION 1..14: note = GFR-binding peptide
PTQVQLSNITVQIM

SEQ ID NO: 5462 - protein, 17 aa, synthetic construct
  REGION 1..17: note = GFR-binding peptide
  VARIANT 3..4: note = Xaa is C or S
APXXVPQALSNITIQIM

SEQ ID NO: 5463 - protein, 10 aa, synthetic construct
  REGION 1..10: note = GFR-binding peptide
HHSNITVQIM

SEQ ID NO: 5464 - protein, 9 aa, synthetic construct
  REGION 1..9: note = GFR-binding peptide
LSNITIQIM

SEQ ID NO: 5465 - protein, 17 aa, synthetic construct
  REGION 1..17: note = GFR-binding peptide
  VARIANT 3..4: note = Xaa is C or S
SPXXVSQDLSNITIQIM

SEQ ID NO: 5466 - protein, 17 aa, synthetic construct
  REGION 1..17: note = GFR-binding peptide
  VARIANT 3..4: note = Xaa is C or S
STXXAPVKTSNITMQIM

SEQ ID NO: 5467 - protein, 18 aa, synthetic construct
  REGION 1..18: note = GFR-binding peptide
  VARIANT 4..5: note = Xaa is C or S
ASPXXVSQDLSNITIQIM

SEQ ID NO: 5468 - protein, 15 aa, synthetic construct
  REGION 1..15: note = GFR-binding peptide
  VARIANT 1..2: note = Xaa is C or S
XXVPQALSNITIQIM

SEQ ID NO: 5469 - protein, 20 aa, synthetic construct
  REGION 1..20: note = GFR-binding peptide
  VARIANT 6..7: note = Xaa is C or S
GSAGPXXTPTKMSNITMQIM

SEQ ID NO: 5470 - protein, 14 aa, synthetic construct
  REGION 1..14: note = GFR-binding peptide
  VARIANT 1: note = Xaa is C or S
XVPTRLSNITIQIM

SEQ ID NO: 5471 - protein, 18 aa, synthetic construct
  REGION 1..18: note = GFR-binding peptide
  VARIANT 4..5: note = Xaa is C or S
PKPXXAPTKLSNITVQIM

SEQ ID NO: 5472 - protein, 12 aa, synthetic construct
  REGION 1..12: note = GFR-binding peptide
PQALSNITIQIM

SEQ ID NO: 5473 - protein, 12 aa, synthetic construct
  REGION 1..12: note = GFR-binding peptide
PTKLSNITVQIM

SEQ ID NO: 5474 - protein, 18 aa, synthetic construct
  REGION 1..18: note = GFR-binding peptide
  VARIANT 4..5: note = Xaa is C or S
ASPXXVPQDLSNITIQIM

SEQ ID NO: 5475 - protein, 12 aa, synthetic construct
  REGION 1..12: note = GFR-binding peptide
PVKTSNITMQIM

SEQ ID NO: 5476 - protein, 12 aa, synthetic construct
  REGION 1..12: note = GFR-binding peptide
PTRLSNITIQIM

SEQ ID NO: 5477 - protein, 14 aa, synthetic construct
  REGION 1..14: note = GFR-binding peptide
  VARIANT 1: note = Xaa is C or S
XVSQDLSNITIQIM

SEQ ID NO: 5478 - protein, 19 aa, synthetic construct
  REGION 1..19: note = GFR-binding peptide
  VARIANT 5..6: note = Xaa is C or S
APASXXVPARLSNITIQIM

SEQ ID NO: 5479 - protein, 17 aa, synthetic construct
  REGION 1..17: note = GFR-binding peptide
  VARIANT 2: note = Xaa is C or S
QXRPTQVQLSNITVQIM

SEQ ID NO: 5480 - protein, 13 aa, synthetic construct
  REGION 1..13: note = GFR-binding peptide
VPARLSNITIQIM

SEQ ID NO: 5481 - protein, 20 aa, synthetic construct
  REGION 1..20: note = GFR-binding peptide
  VARIANT 6..7: note = Xaa is C or S
HVPKPXXAPTKLSNITVQIM

SEQ ID NO: 5482 - protein, 17 aa, synthetic construct
  REGION 1..17: note = GFR-binding peptide
  VARIANT 3..4: note = Xaa is C or S
PTXXVPTRLSNITIQIM

SEQ ID NO: 5483 - protein, 20 aa, synthetic construct
  REGION 1..20: note = GFR-binding peptide
  VARIANT 6..7: note = Xaa is C or S
ASASPXXVPQDLSNITIQIM

SEQ ID NO: 5484 - protein, 9 aa, synthetic construct
  REGION 1..9: note = GFR-binding peptide
MSNITMQIM

SEQ ID NO: 5485 - protein, 19 aa, synthetic construct
  REGION 1..19: note = GFR-binding peptide
  VARIANT 5..6: note = Xaa is C or S
VPKPXXAPTKLSNITVQIM

SEQ ID NO: 5486 - protein, 19 aa, synthetic construct
  REGION 1..19: note = GFR-binding peptide
  VARIANT 5..6: note = Xaa is C or S
SAAPXXVPQALSNITIQIM

SEQ ID NO: 5487 - protein, 17 aa, synthetic construct
  REGION 1..17: note = GFR-binding peptide
  VARIANT 3..4: note = Xaa is C or S
KPXXAPTKLSNITVQIM

SEQ ID NO: 5488 - protein, 16 aa, synthetic construct
  REGION 1..16: note = GFR-binding peptide
  VARIANT 2..3: note = Xaa is C or S
PXXVPQALSNITIQIM

SEQ ID NO: 5489 - protein, 20 aa, synthetic construct
  REGION 1..20: note = GFR-binding peptide
  VARIANT 6..7: note = Xaa is C or S
STPPTXXVPTRLSNITIQIM

SEQ ID NO: 5490 - protein, 12 aa, synthetic construct
  REGION 1..12: note = GFR-binding peptide
PTKMSNITMQIM

SEQ ID NO: 5491 - protein, 10 aa, synthetic construct
  REGION 1..10: note = GFR-binding peptide
DLSNITIQIM

SEQ ID NO: 5492 - protein, 14 aa, synthetic construct
  REGION 1..14: note = GFR-binding peptide
  VARIANT 1: note = Xaa is C or S
XVPARLSNITIQIM

SEQ ID NO: 5493 - protein, 16 aa, synthetic construct
  REGION 1..16: note = GFR-binding peptide
  VARIANT 2..3: note = Xaa is C or S
PXXVPQDLSNITIQIM

SEQ ID NO: 5494 - protein, 14 aa, synthetic construct
  REGION 1..14: note = GFR-binding peptide
  VARIANT 1: note = Xaa is C or S
XAPTKLSNITVQIM

SEQ ID NO: 5495 - protein, 20 aa, synthetic construct
  REGION 1..20: note = GFR-binding peptide
  VARIANT 6..7: note = Xaa is C or S
ASASPXXVSQDLSNITIQIM

SEQ ID NO: 5496 - protein, 19 aa, synthetic construct
  REGION 1..19: note = GFR-binding peptide
  VARIANT 4: note = Xaa is C or S
SVKXQPSRVHHSNITVQIM

SEQ ID NO: 5497 - protein, 18 aa, synthetic construct
  REGION 1..18: note = GFR-binding peptide
  VARIANT 4..5: note = Xaa is C or S
PASXXVPARLSNITIQIM

SEQ ID NO: 5498 - protein, 9 aa, synthetic construct
  REGION 1..9: note = GFR-binding peptide
LSNITVQIM

SEQ ID NO: 5499 - protein, 19 aa, synthetic construct
  REGION 1..19: note = GFR-binding peptide
  VARIANT 5..6: note = Xaa is C or S
SAGPXXTPTKMSNITMQIM

SEQ ID NO: 5500 - protein, 11 aa, synthetic construct
  REGION 1..11: note = GFR-binding peptide
TKMSNITMQIM

SEQ ID NO: 5501 - protein, 19 aa, synthetic construct
  REGION 1..19: note = GFR-binding peptide
  VARIANT 4: note = Xaa is C or S
NVQXRPTQVQLSNITVQIM

SEQ ID NO: 5502 - protein, 15 aa, synthetic construct
  REGION 1..15: note = GFR-binding peptide
  VARIANT 1..2: note = Xaa is C or S
XXVSQDLSNITIQIM

SEQ ID NO: 5503 - protein, 16 aa, synthetic construct
  REGION 1..16: note = GFR-binding peptide
  VARIANT 1: note = Xaa is C or S
XQPSRVHHSNITVQIM

SEQ ID NO: 5504 - protein, 9 aa, synthetic construct
  REGION 1..9: note = GFR-binding peptide
HSNITVQIM

SEQ ID NO: 5505 - protein, 17 aa, synthetic construct
  REGION 1..17: note = GFR-binding peptide
  VARIANT 3..4: note = Xaa is C or S
SPXXVPQDLSNITIQIM

SEQ ID NO: 5506 - protein, 20 aa, synthetic construct
  REGION 1..20: note = GFR-binding peptide
  VARIANT 6..7: note = Xaa is C or S
AAPASXXVPARLSNITIQIM

SEQ ID NO: 5507 - protein, 14 aa, synthetic construct
  REGION 1..14: note = GFR-binding peptide
  VARIANT 1: note = Xaa is C or S
XAPVKTSNITMQIM

SEQ ID NO: 5508 - protein, 11 aa, synthetic construct
  REGION 1..11: note = GFR-binding peptide
TKLSNITVQIM

SEQ ID NO: 5509 - protein, 12 aa, synthetic construct
  REGION 1..12: note = GFR-binding peptide
QVQLSNITVQIM

SEQ ID NO: 5510 - protein, 11 aa, synthetic construct
  REGION 1..11: note = GFR-binding peptide
TRLSNITIQIM

SEQ ID NO: 5511 - protein, 11 aa, synthetic construct
  REGION 1..11: note = GFR-binding peptide
MIQITINSLDQ

SEQ ID NO: 5512 - protein, 19 aa, synthetic construct
  REGION 1..19: note = GFR-binding peptide
  VARIANT 14..15: note = Xaa is C or S
MIQITINSLRTPVXXTPPT

SEQ ID NO: 5513 - protein, 13 aa, synthetic construct
  REGION 1..13: note = GFR-binding peptide
MIQITINSLAQPV

SEQ ID NO: 5514 - protein, 18 aa, synthetic construct
  REGION 1..18: note = GFR-binding peptide
  VARIANT 16: note = Xaa is C or S
MIQVTINSLQVQTPRXQV

SEQ ID NO: 5515 - protein, 12 aa, synthetic construct
  REGION 1..12: note = GFR-binding peptide
MIQVTINSHHVR

SEQ ID NO: 5516 - protein, 14 aa, synthetic construct
  REGION 1..14: note = GFR-binding peptide
  VARIANT 14: note = Xaa is C or S
MIQMTINSMKTPTX

SEQ ID NO: 5517 - protein, 10 aa, synthetic construct
  REGION 1..10: note = GFR-binding peptide
MIQVTINSLQ

SEQ ID NO: 5518 - protein, 10 aa, synthetic construct
  REGION 1..10: note = GFR-binding peptide
MIQVTINSLK

SEQ ID NO: 5519 - protein, 9 aa, synthetic construct
  REGION 1..9: note = GFR-binding peptide
MIQMTINST

SEQ ID NO: 5520 - protein, 15 aa, synthetic construct
  REGION 1..15: note = GFR-binding peptide
  VARIANT 14: note = Xaa is C or S
MIQMTINSEETPVXE

SEQ ID NO: 5521 - protein, 15 aa, synthetic construct
  REGION 1..15: note = GFR-binding peptide
MIQVTINSLQVQTPR

SEQ ID NO: 5522 - protein, 16 aa, synthetic construct
  REGION 1..16: note = GFR-binding peptide
  VARIANT 14..15: note = Xaa is C or S
MIQMTINSTKVPAXXT

SEQ ID NO: 5523 - protein, 18 aa, synthetic construct
  REGION 1..18: note = GFR-binding peptide
  VARIANT 14: note = Xaa is C or S
MIQMTINSEETPVXELGE

SEQ ID NO: 5524 - protein, 12 aa, synthetic construct
  REGION 1..12: note = GFR-binding peptide
MIQITINSLRAP

SEQ ID NO: 5525 - protein, 20 aa, synthetic construct
  REGION 1..20: note = GFR-binding peptide
  VARIANT 16: note = Xaa is C or S
MIQVTINSLQVQTPRXQVNR

SEQ ID NO: 5526 - protein, 15 aa, synthetic construct
  REGION 1..15: note = GFR-binding peptide
  VARIANT 14..15: note = Xaa is C or S
MIQITINSLDQPVXX

SEQ ID NO: 5527 - protein, 10 aa, synthetic construct
  REGION 1..10: note = GFR-binding peptide
MIQITINSLR

SEQ ID NO: 5528 - protein, 13 aa, synthetic construct
  REGION 1..13: note = GFR-binding peptide
MIQVTINSLKTPA

SEQ ID NO: 5529 - protein, 20 aa, synthetic construct
  REGION 1..20: note = GFR-binding peptide
  VARIANT 14..15: note = Xaa is C or S
MIQITINSLAQPVXXPAASA

SEQ ID NO: 5530 - protein, 11 aa, synthetic construct
  REGION 1..11: note = GFR-binding peptide
MIQITINSLRA

SEQ ID NO: 5531 - protein, 19 aa, synthetic construct
  REGION 1..19: note = GFR-binding peptide
  VARIANT 14..15: note = Xaa is C or S
MIQITINSLDQSVXXPSAS

SEQ ID NO: 5532 - protein, 13 aa, synthetic construct
  REGION 1..13: note = GFR-binding peptide
MIQMTINSTKVPA

SEQ ID NO: 5533 - protein, 14 aa, synthetic construct
  REGION 1..14: note = GFR-binding peptide
  VARIANT 14: note = Xaa is C or S
MIQITINSLAQPVX

SEQ ID NO: 5534 - protein, 18 aa, synthetic construct
  REGION 1..18: note = GFR-binding peptide
  VARIANT 14..15: note = Xaa is C or S
MIQMTINSMKTPTXXPGA

SEQ ID NO: 5535 - protein, 17 aa, synthetic construct
  REGION 1..17: note = GFR-binding peptide
  VARIANT 14: note = Xaa is C or S
MIQMTINSEETPVXELG

SEQ ID NO: 5536 - protein, 13 aa, synthetic construct
  REGION 1..13: note = GFR-binding peptide
MIQVTINSLQVQT

SEQ ID NO: 5537 - protein, 16 aa, synthetic construct
  REGION 1..16: note = GFR-binding peptide
  VARIANT 14..15: note = Xaa is C or S
MIQMTINSMKTPTXXP

SEQ ID NO: 5538 - protein, 11 aa, synthetic construct
  REGION 1..11: note = GFR-binding peptide
MIQVTINSLQV

SEQ ID NO: 5539 - protein, 15 aa, synthetic construct
  REGION 1..15: note = GFR-binding peptide
  VARIANT 14..15: note = Xaa is C or S
MIQITINSLRAPVXX

SEQ ID NO: 5540 - protein, 20 aa, synthetic construct
  REGION 1..20: note = GFR-binding peptide
  VARIANT 14: note = Xaa is C or S
MIQMTINSEETPVXELGEDN

SEQ ID NO: 5541 - protein, 12 aa, synthetic construct
  REGION 1..12: note = GFR-binding peptide
MIQITINSLDQS

SEQ ID NO: 5542 - protein, 9 aa, synthetic construct
  REGION 1..9: note = GFR-binding peptide
MIQMTINSE

SEQ ID NO: 5543 - protein, 17 aa, synthetic construct
  REGION 1..17: note = GFR-binding peptide
  VARIANT 16: note = Xaa is C or S
MIQVTINSHHVRSPQXK

SEQ ID NO: 5544 - protein, 16 aa, synthetic construct
  REGION 1..16: note = GFR-binding peptide
  VARIANT 16: note = Xaa is C or S
MIQVTINSLQVQTPRX

SEQ ID NO: 5545 - protein, 14 aa, synthetic construct
  REGION 1..14: note = GFR-binding peptide
MIQVTINSHHVRSP

SEQ ID NO: 5546 - protein, 11 aa, synthetic construct
  REGION 1..11: note = GFR-binding peptide
MIQMTINSQGT

SEQ ID NO: 5547 - protein, 16 aa, synthetic construct
  REGION 1..16: note = GFR-binding peptide
  VARIANT 14..15: note = Xaa is C or S
MIQITINSLDQSVXXP

SEQ ID NO: 5548 - protein, 13 aa, synthetic construct
  REGION 1..13: note = GFR-binding peptide
MIQITINSLRTPV

SEQ ID NO: 5549 - protein, 15 aa, synthetic construct
  REGION 1..15: note = GFR-binding peptide
  VARIANT 14..15: note = Xaa is C or S
MIQMTINSMKTPTXX

SEQ ID NO: 5550 - protein, 16 aa, synthetic construct
  REGION 1..16: note = GFR-binding peptide
  VARIANT 14..15: note = Xaa is C or S
MIQITINSLRAPVXXS

SEQ ID NO: 5551 - protein, 11 aa, synthetic construct
  REGION 1..11: note = GFR-binding peptide
MIQMTINSEET

SEQ ID NO: 5552 - protein, 15 aa, synthetic construct
  REGION 1..15: note = GFR-binding peptide
  VARIANT 14..15: note = Xaa is C or S
MIQMTINSTKVPAXX

SEQ ID NO: 5553 - protein, 10 aa, synthetic construct
  REGION 1..10: note = GFR-binding peptide
MIQITINSLA

SEQ ID NO: 5554 - protein, 19 aa, synthetic construct
  REGION 1..19: note = GFR-binding peptide
  VARIANT 14..15: note = Xaa is C or S
MIQITINSLDQPVXXPSAS

SEQ ID NO: 5555 - protein, 16 aa, synthetic construct
  REGION 1..16: note = GFR-binding peptide
  VARIANT 14..15: note = Xaa is C or S
MIQITINSLRTPVXXT

SEQ ID NO: 5556 - protein, 16 aa, synthetic construct
  REGION 1..16: note = GFR-binding peptide
  VARIANT 14: note = Xaa is C or S
MIQMTINSEETPVXEL

SEQ ID NO: 5557 - protein, 15 aa, synthetic construct
  REGION 1..15: note = GFR-binding peptide
  VARIANT 14..15: note = Xaa is C or S
MIQITINSLRTPVXX

SEQ ID NO: 5558 - protein, 13 aa, synthetic construct
  REGION 1..13: note = GFR-binding peptide
MIQVTINSHHVRS

SEQ ID NO: 5559 - protein, 14 aa, synthetic construct
  REGION 1..14: note = GFR-binding peptide
  VARIANT 14: note = Xaa is C or S
MIQMTINSEETPVX

SEQ ID NO: 5560 - protein, 18 aa, synthetic construct
  REGION 1..18: note = GFR-binding peptide
  VARIANT 14..15: note = Xaa is C or S
MIQITINSLRTPVXXTPP

SEQ ID NO: 5561 - protein, 10 aa, synthetic construct
  REGION 1..10: note = GFR-binding peptide
MIQMTINSMK

SEQ ID NO: 5562 - protein, 17 aa, synthetic construct
  REGION 1..17: note = GFR-binding peptide
  VARIANT 14..15: note = Xaa is C or S
MIQMTINSMKTPTXXPG

SEQ ID NO: 5563 - protein, 15 aa, synthetic construct
  REGION 1..15: note = GFR-binding peptide
MIQVTINSHHVRSPQ

SEQ ID NO: 5564 - protein, 13 aa, synthetic construct
  REGION 1..13: note = GFR-binding peptide
MIQMTINSMKTPT

SEQ ID NO: 5565 - protein, 14 aa, synthetic construct
  REGION 1..14: note = GFR-binding peptide
  VARIANT 14: note = Xaa is C or S
MIQITINSLDQPVX

SEQ ID NO: 5566 - protein, 14 aa, synthetic construct
  REGION 1..14: note = GFR-binding peptide
  VARIANT 14: note = Xaa is C or S
MIQMTINSQGTPVX

SEQ ID NO: 5567 - protein, 12 aa, synthetic construct
  REGION 1..12: note = GFR-binding peptide
MIQMTINSQGTP

SEQ ID NO: 5568 - protein, 12 aa, synthetic construct
  REGION 1..12: note = GFR-binding peptide
MIQITINSLDQP

SEQ ID NO: 5569 - protein, 16 aa, synthetic construct
  REGION 1..16: note = GFR-binding peptide
  VARIANT 14..15: note = Xaa is C or S
MIQVTINSLKTPAXXP

SEQ ID NO: 5570 - protein, 20 aa, synthetic construct
  REGION 1..20: note = GFR-binding peptide
  VARIANT 16: note = Xaa is C or S
MIQVTINSHHVRSPQXKVSS

SEQ ID NO: 5571 - protein, 12 aa, synthetic construct
  REGION 1..12: note = GFR-binding peptide
MIQMTINSEETP

SEQ ID NO: 5572 - protein, 15 aa, synthetic construct
  REGION 1..15: note = GFR-binding peptide
  VARIANT 14..15: note = Xaa is C or S
MIQVTINSLKTPAXX

SEQ ID NO: 5573 - protein, 11 aa, synthetic construct
  REGION 1..11: note = GFR-binding peptide
MIQITINSLAQ

SEQ ID NO: 5574 - protein, 19 aa, synthetic construct
  REGION 1..19: note = GFR-binding peptide
  VARIANT 14..15: note = Xaa is C or S
MIQMTINSTKVPAXXTSPV

SEQ ID NO: 5575 - protein, 10 aa, synthetic construct
  REGION 1..10: note = GFR-binding peptide
MIQMTINSTK

SEQ ID NO: 5576 - protein, 13 aa, synthetic construct
  REGION 1..13: note = GFR-binding peptide
MIQITINSLDQPV

SEQ ID NO: 5577 - protein, 11 aa, synthetic construct
  REGION 1..11: note = GFR-binding peptide
MIQMTINSTKV

SEQ ID NO: 5578 - protein, 18 aa, synthetic construct
  REGION 1..18: note = GFR-binding peptide
  VARIANT 14..15: note = Xaa is C or S
MIQITINSLAQPVXXPAA

SEQ ID NO: 5579 - protein, 17 aa, synthetic construct
  REGION 1..17: note = GFR-binding peptide
  VARIANT 14..15: note = Xaa is C or S
MIQITINSLRAPVXXSA

SEQ ID NO: 5580 - protein, 11 aa, synthetic construct
  REGION 1..11: note = GFR-binding peptide
MIQVTINSHHV

SEQ ID NO: 5581 - protein, 18 aa, synthetic construct
  REGION 1..18: note = GFR-binding peptide
  VARIANT 14: note = Xaa is C or S
MIQMTINSQGTPVXELGE

SEQ ID NO: 5582 - protein, 13 aa, synthetic construct
  REGION 1..13: note = GFR-binding peptide
MIQITINSLDQSV

SEQ ID NO: 5583 - protein, 18 aa, synthetic construct
  REGION 1..18: note = GFR-binding peptide
  VARIANT 14..15: note = Xaa is C or S
MIQMTINSTKVPAXXTSP

SEQ ID NO: 5584 - protein, 18 aa, synthetic construct
  REGION 1..18: note = GFR-binding peptide
  VARIANT 16: note = Xaa is C or S
MIQVTINSHHVRSPQXKV

SEQ ID NO: 5585 - protein, 14 aa, synthetic construct
  REGION 1..14: note = GFR-binding peptide
MIQVTINSLQVQTP

SEQ ID NO: 5586 - protein, 17 aa, synthetic construct
  REGION 1..17: note = GFR-binding peptide
  VARIANT 14..15: note = Xaa is C or S
MIQITINSLAQPVXXPA

SEQ ID NO: 5587 - protein, 10 aa, synthetic construct
  REGION 1..10: note = GFR-binding peptide
MIQVTINSHH

SEQ ID NO: 5588 - protein, 9 aa, synthetic construct
  REGION 1..9: note = GFR-binding peptide
MIQITINSL

SEQ ID NO: 5589 - protein, 17 aa, synthetic construct
  REGION 1..17: note = GFR-binding peptide
  VARIANT 14..15: note = Xaa is C or S
MIQITINSLDQSVXXPS

SEQ ID NO: 5590 - protein, 10 aa, synthetic construct
  REGION 1..10: note = GFR-binding peptide
MIQMTINSEE

SEQ ID NO: 5591 - protein, 17 aa, synthetic construct
  REGION 1..17: note = GFR-binding peptide
  VARIANT 14..15: note = Xaa is C or S
MIQMTINSTKVPAXXTS

SEQ ID NO: 5592 - protein, 18 aa, synthetic construct
  REGION 1..18: note = GFR-binding peptide
  VARIANT 14..15: note = Xaa is C or S
MIQITINSLDQSVXXPSA

SEQ ID NO: 5593 - protein, 15 aa, synthetic construct
  REGION 1..15: note = GFR-binding peptide
  VARIANT 14..15: note = Xaa is C or S
MIQITINSLAQPVXX

SEQ ID NO: 5594 - protein, 14 aa, synthetic construct
  REGION 1..14: note = GFR-binding peptide
  VARIANT 14: note = Xaa is C or S
MIQITINSLRTPVX

SEQ ID NO: 5595 - protein, 18 aa, synthetic construct
  REGION 1..18: note = GFR-binding peptide
  VARIANT 14..15: note = Xaa is C or S
MIQVTINSLKTPAXXPKP

SEQ ID NO: 5596 - protein, 12 aa, synthetic construct
  REGION 1..12: note = GFR-binding peptide
MIQITINSLAQP

SEQ ID NO: 5597 - protein, 12 aa, synthetic construct
  REGION 1..12: note = GFR-binding peptide
MIQVTINSLKTP

SEQ ID NO: 5598 - protein, 18 aa, synthetic construct
  REGION 1..18: note = GFR-binding peptide
  VARIANT 14..15: note = Xaa is C or S
MIQITINSLDQPVXXPSA

SEQ ID NO: 5599 - protein, 17 aa, synthetic construct
  REGION 1..17: note = GFR-binding peptide
  VARIANT 14: note = Xaa is C or S
MIQMTINSQGTPVXELG

SEQ ID NO: 5600 - protein, 12 aa, synthetic construct
  REGION 1..12: note = GFR-binding peptide
MIQMTINSTKVP

SEQ ID NO: 5601 - protein, 12 aa, synthetic construct
  REGION 1..12: note = GFR-binding peptide
MIQITINSLRTP

SEQ ID NO: 5602 - protein, 14 aa, synthetic construct
  REGION 1..14: note = GFR-binding peptide
  VARIANT 14: note = Xaa is C or S
MIQITINSLDQSVX

SEQ ID NO: 5603 - protein, 19 aa, synthetic construct
  REGION 1..19: note = GFR-binding peptide
  VARIANT 14..15: note = Xaa is C or S
MIQITINSLRAPVXXSAPA

SEQ ID NO: 5604 - protein, 16 aa, synthetic construct
  REGION 1..16: note = GFR-binding peptide
  VARIANT 14: note = Xaa is C or S
MIQMTINSQGTPVXEL

SEQ ID NO: 5605 - protein, 17 aa, synthetic construct
  REGION 1..17: note = GFR-binding peptide
  VARIANT 16: note = Xaa is C or S
MIQVTINSLQVQTPRXQ

SEQ ID NO: 5606 - protein, 13 aa, synthetic construct
  REGION 1..13: note = GFR-binding peptide
MIQITINSLRAPV

SEQ ID NO: 5607 - protein, 20 aa, synthetic construct
  REGION 1..20: note = GFR-binding peptide
  VARIANT 14..15: note = Xaa is C or S
MIQVTINSLKTPAXXPKPVH

SEQ ID NO: 5608 - protein, 17 aa, synthetic construct
  REGION 1..17: note = GFR-binding peptide
  VARIANT 14..15: note = Xaa is C or S
MIQITINSLRTPVXXTP

SEQ ID NO: 5609 - protein, 13 aa, synthetic construct
  REGION 1..13: note = GFR-binding peptide
MIQMTINSEETPV

SEQ ID NO: 5610 - protein, 13 aa, synthetic construct
  REGION 1..13: note = GFR-binding peptide
MIQMTINSQGTPV

SEQ ID NO: 5611 - protein, 20 aa, synthetic construct
  REGION 1..20: note = GFR-binding peptide
  VARIANT 14..15: note = Xaa is C or S
MIQITINSLDQPVXXPSASA

SEQ ID NO: 5612 - protein, 19 aa, synthetic construct
  REGION 1..19: note = GFR-binding peptide
  VARIANT 14: note = Xaa is C or S
MIQMTINSQGTPVXELGED

SEQ ID NO: 5613 - protein, 9 aa, synthetic construct
  REGION 1..9: note = GFR-binding peptide
MIQMTINSM

SEQ ID NO: 5614 - protein, 19 aa, synthetic construct
  REGION 1..19: note = GFR-binding peptide
  VARIANT 14..15: note = Xaa is C or S
MIQVTINSLKTPAXXPKPV

SEQ ID NO: 5615 - protein, 19 aa, synthetic construct
  REGION 1..19: note = GFR-binding peptide
  VARIANT 14..15: note = Xaa is C or S
MIQITINSLAQPVXXPAAS

SEQ ID NO: 5616 - protein, 17 aa, synthetic construct
  REGION 1..17: note = GFR-binding peptide
  VARIANT 14..15: note = Xaa is C or S
MIQVTINSLKTPAXXPK

SEQ ID NO: 5617 - protein, 16 aa, synthetic construct
  REGION 1..16: note = GFR-binding peptide
  VARIANT 14..15: note = Xaa is C or S
MIQITINSLAQPVXXP

SEQ ID NO: 5618 - protein, 20 aa, synthetic construct
  REGION 1..20: note = GFR-binding peptide
  VARIANT 14..15: note = Xaa is C or S
MIQITINSLRTPVXXTPPTS

SEQ ID NO: 5619 - protein, 12 aa, synthetic construct
  REGION 1..12: note = GFR-binding peptide
MIQMTINSMKTP

SEQ ID NO: 5620 - protein, 10 aa, synthetic construct
  REGION 1..10: note = GFR-binding peptide
MIQITINSLD

SEQ ID NO: 5621 - protein, 14 aa, synthetic construct
  REGION 1..14: note = GFR-binding peptide
  VARIANT 14: note = Xaa is C or S
MIQITINSLRAPVX

SEQ ID NO: 5622 - protein, 16 aa, synthetic construct
  REGION 1..16: note = GFR-binding peptide
  VARIANT 14..15: note = Xaa is C or S
MIQITINSLDQPVXXP

SEQ ID NO: 5623 - protein, 14 aa, synthetic construct
  REGION 1..14: note = GFR-binding peptide
  VARIANT 14: note = Xaa is C or S
MIQVTINSLKTPAX

SEQ ID NO: 5624 - protein, 19 aa, synthetic construct
  REGION 1..19: note = GFR-binding peptide
  VARIANT 14: note = Xaa is C or S
MIQMTINSEETPVXELGED

SEQ ID NO: 5625 - protein, 20 aa, synthetic construct
  REGION 1..20: note = GFR-binding peptide
  VARIANT 14..15: note = Xaa is C or S
MIQITINSLDQSVXXPSASA

SEQ ID NO: 5626 - protein, 19 aa, synthetic construct
  REGION 1..19: note = GFR-binding peptide
  VARIANT 16: note = Xaa is C or S
MIQVTINSHHVRSPQXKVS

SEQ ID NO: 5627 - protein, 18 aa, synthetic construct
  REGION 1..18: note = GFR-binding peptide
  VARIANT 14..15: note = Xaa is C or S
MIQITINSLRAPVXXSAP

SEQ ID NO: 5628 - protein, 9 aa, synthetic construct
  REGION 1..9: note = GFR-binding peptide
MIQVTINSL

SEQ ID NO: 5629 - protein, 19 aa, synthetic construct
  REGION 1..19: note = GFR-binding peptide
  VARIANT 14..15: note = Xaa is C or S
MIQMTINSMKTPTXXPGAS

SEQ ID NO: 5630 - protein, 11 aa, synthetic construct
  REGION 1..11: note = GFR-binding peptide
MIQMTINSMKT

SEQ ID NO: 5631 - protein, 19 aa, synthetic construct
  REGION 1..19: note = GFR-binding peptide
  VARIANT 16: note = Xaa is C or S
MIQVTINSLQVQTPRXQVN

SEQ ID NO: 5632 - protein, 15 aa, synthetic construct
  REGION 1..15: note = GFR-binding peptide
  VARIANT 14..15: note = Xaa is C or S
MIQITINSLDQSVXX

SEQ ID NO: 5633 - protein, 16 aa, synthetic construct
  REGION 1..16: note = GFR-binding peptide
  VARIANT 16: note = Xaa is C or S
MIQVTINSHHVRSPQX

SEQ ID NO: 5634 - protein, 9 aa, synthetic construct
  REGION 1..9: note = GFR-binding peptide
MIQVTINSH

SEQ ID NO: 5635 - protein, 15 aa, synthetic construct
  REGION 1..15: note = GFR-binding peptide
  VARIANT 14: note = Xaa is C or S
MIQMTINSQGTPVXE

SEQ ID NO: 5636 - protein, 8 aa, synthetic construct
  REGION 1..8: note = GFR-binding peptide
MIQMTINS

SEQ ID NO: 5637 - protein, 17 aa, synthetic construct
  REGION 1..17: note = GFR-binding peptide
  VARIANT 14..15: note = Xaa is C or S
MIQITINSLDQPVXXPS

SEQ ID NO: 5638 - protein, 20 aa, synthetic construct
  REGION 1..20: note = GFR-binding peptide
  VARIANT 14..15: note = Xaa is C or S
MIQITINSLRAPVXXSAPAA

SEQ ID NO: 5639 - protein, 14 aa, synthetic construct
  REGION 1..14: note = GFR-binding peptide
  VARIANT 14: note = Xaa is C or S
MIQMTINSTKVPAX

SEQ ID NO: 5640 - protein, 10 aa, synthetic construct
  REGION 1..10: note = GFR-binding peptide
MIQMTINSQG

SEQ ID NO: 5641 - protein, 11 aa, synthetic construct
  REGION 1..11: note = GFR-binding peptide
MIQVTINSLKT

SEQ ID NO: 5642 - protein, 9 aa, synthetic construct
  REGION 1..9: note = GFR-binding peptide
MIQMTINSQ

SEQ ID NO: 5643 - protein, 12 aa, synthetic construct
  REGION 1..12: note = GFR-binding peptide
MIQVTINSLQVQ

SEQ ID NO: 5644 - protein, 11 aa, synthetic construct
  REGION 1..11: note = GFR-binding peptide
MIQITINSLRT

SEQ ID NO: 5645 - protein, 10 aa, synthetic construct
  REGION 1..10: note = GFR-binding peptide
KMNAISILYF

SEQ ID NO: 5646 - protein, 13 aa, synthetic construct
  REGION 1..13: note = GFR-binding peptide
APTQLSAISVLYL

SEQ ID NO: 5647 - protein, 14 aa, synthetic construct
  REGION 1..14: note = GFR-binding peptide
  VARIANT 1: note = Xaa is C or S
XVPQALNAISILYF

SEQ ID NO: 5648 - protein, 16 aa, synthetic construct
  REGION 1..16: note = GFR-binding peptide
  VARIANT 2..3: note = Xaa is C or S
PXXTPTKMSAISMLYL

SEQ ID NO: 5649 - protein, 13 aa, synthetic construct
  REGION 1..13: note = GFR-binding peptide
VPTKLSAISILYL

SEQ ID NO: 5650 - protein, 17 aa, synthetic construct
  REGION 1..17: note = GFR-binding peptide
  VARIANT 3..4: note = Xaa is C or S
KAXXAPTKLSAISVLYL

SEQ ID NO: 5651 - protein, 14 aa, synthetic construct
  REGION 1..14: note = GFR-binding peptide
  VARIANT 1: note = Xaa is C or S
XVPTKLNAISILYF

SEQ ID NO: 5652 - protein, 9 aa, synthetic construct
  REGION 1..9: note = GFR-binding peptide
TNAISMLYF

SEQ ID NO: 5653 - protein, 10 aa, synthetic construct
  REGION 1..10: note = GFR-binding peptide
QLSAISVLYL

SEQ ID NO: 5654 - protein, 19 aa, synthetic construct
  REGION 1..19: note = GFR-binding peptide
  VARIANT 5..6: note = Xaa is C or S
SASPXXVSQDLSAISILYL

SEQ ID NO: 5655 - protein, 20 aa, synthetic construct
  REGION 1..20: note = GFR-binding peptide
  VARIANT 6..7: note = Xaa is C or S
GIPEPXXVPEKMNAISILYF

SEQ ID NO: 5656 - protein, 20 aa, synthetic construct
  REGION 1..20: note = GFR-binding peptide
  VARIANT 6..7: note = Xaa is C or S
AAPASXXVPARLNAISILYF

SEQ ID NO: 5657 - protein, 15 aa, synthetic construct
  REGION 1..15: note = GFR-binding peptide
  VARIANT 1..2: note = Xaa is C or S
XXAPVKTNAISMLYF

SEQ ID NO: 5658 - protein, 11 aa, synthetic construct
  REGION 1..11: note = GFR-binding peptide
QDLNAISILYF

SEQ ID NO: 5659 - protein, 15 aa, synthetic construct
  REGION 1..15: note = GFR-binding peptide
  VARIANT 1..2: note = Xaa is C or S
XXVPARLSAISILYL

SEQ ID NO: 5660 - protein, 13 aa, synthetic construct
  REGION 1..13: note = GFR-binding peptide
VPTRLSAISILYL

SEQ ID NO: 5661 - protein, 13 aa, synthetic construct
  REGION 1..13: note = GFR-binding peptide
VPQALSAISILYL

SEQ ID NO: 5662 - protein, 19 aa, synthetic construct
  REGION 1..19: note = GFR-binding peptide
  VARIANT 5..6: note = Xaa is C or S
SAAPXXVPQALNAISILYF

SEQ ID NO: 5663 - protein, 10 aa, synthetic construct
  REGION 1..10: note = GFR-binding peptide
ALSAISILYL

SEQ ID NO: 5664 - protein, 19 aa, synthetic construct
  REGION 1..19: note = GFR-binding peptide
  VARIANT 5..6: note = Xaa is C or S
IPEPXXVPEKMSAISILYL

SEQ ID NO: 5665 - protein, 12 aa, synthetic construct
  REGION 1..12: note = GFR-binding peptide
PTELNAISMLYF

SEQ ID NO: 5666 - protein, 12 aa, synthetic construct
  REGION 1..12: note = GFR-binding peptide
PARLNAISILYF

SEQ ID NO: 5667 - protein, 10 aa, synthetic construct
  REGION 1..10: note = GFR-binding peptide
RLSAISILYL

SEQ ID NO: 5668 - protein, 14 aa, synthetic construct
  REGION 1..14: note = GFR-binding peptide
  VARIANT 1: note = Xaa is C or S
XVPEKMSAISILYL

SEQ ID NO: 5669 - protein, 11 aa, synthetic construct
  REGION 1..11: note = GFR-binding peptide
TKMNAISMLYF

SEQ ID NO: 5670 - protein, 10 aa, synthetic construct
  REGION 1..10: note = GFR-binding peptide
ELNAISMLYF

SEQ ID NO: 5671 - protein, 18 aa, synthetic construct
  REGION 1..18: note = GFR-binding peptide
  VARIANT 4..5: note = Xaa is C or S
PASXXVPARLSAISILYL

SEQ ID NO: 5672 - protein, 18 aa, synthetic construct
  REGION 1..18: note = GFR-binding peptide
  VARIANT 4..5: note = Xaa is C or S
PEPXXVPEKMSAISILYL

SEQ ID NO: 5673 - protein, 18 aa, synthetic construct
  REGION 1..18: note = GFR-binding peptide
  VARIANT 4..5: note = Xaa is C or S
AGPXXTPTKMSAISMLYL

SEQ ID NO: 5674 - protein, 20 aa, synthetic construct
  REGION 1..20: note = GFR-binding peptide
  VARIANT 6..7: note = Xaa is C or S
STPPTXXVPTRLSAISILYL

SEQ ID NO: 5675 - protein, 12 aa, synthetic construct
  REGION 1..12: note = GFR-binding peptide
SQDLSAISILYL

SEQ ID NO: 5676 - protein, 14 aa, synthetic construct
  REGION 1..14: note = GFR-binding peptide
  VARIANT 1: note = Xaa is C or S
XAPVKTSAISMLYL

SEQ ID NO: 5677 - protein, 18 aa, synthetic construct
  REGION 1..18: note = GFR-binding peptide
  VARIANT 4..5: note = Xaa is C or S
PKAXXAPTKLNAISVLYF

SEQ ID NO: 5678 - protein, 13 aa, synthetic construct
  REGION 1..13: note = GFR-binding peptide
VPTKLNAISVLYF

SEQ ID NO: 5679 - protein, 19 aa, synthetic construct
  REGION 1..19: note = GFR-binding peptide
  VARIANT 5..6: note = Xaa is C or S
VPKAXXAPTKLNAISVLYF

SEQ ID NO: 5680 - protein, 10 aa, synthetic construct
  REGION 1..10: note = GFR-binding peptide
KLSAISILYL

SEQ ID NO: 5681 - protein, 12 aa, synthetic construct
  REGION 1..12: note = GFR-binding peptide
PQDLNAISILYF

SEQ ID NO: 5682 - protein, 11 aa, synthetic construct
  REGION 1..11: note = GFR-binding peptide
EKMNAISILYF

SEQ ID NO: 5683 - protein, 11 aa, synthetic construct
  REGION 1..11: note = GFR-binding peptide
TRLSAISILYL

SEQ ID NO: 5684 - protein, 14 aa, synthetic construct
  REGION 1..14: note = GFR-binding peptide
  VARIANT 1: note = Xaa is C or S
XAPTKLSAISVLYL

SEQ ID NO: 5685 - protein, 9 aa, synthetic construct
  REGION 1..9: note = GFR-binding peptide
MSAISMLYL

SEQ ID NO: 5686 - protein, 19 aa, synthetic construct
  REGION 1..19: note = GFR-binding peptide
  VARIANT 5..6: note = Xaa is C or S
VPKPXXAPTKLSAISVLYL

SEQ ID NO: 5687 - protein, 19 aa, synthetic construct
  REGION 1..19: note = GFR-binding peptide
  VARIANT 5..6: note = Xaa is C or S
TPPTXXVPTRLSAISILYL

SEQ ID NO: 5688 - protein, 19 aa, synthetic construct
  REGION 1..19: note = GFR-binding peptide
  VARIANT 5..6: note = Xaa is C or S
IPKAXXVPTELNAISMLYF

SEQ ID NO: 5689 - protein, 17 aa, synthetic construct
  REGION 1..17: note = GFR-binding peptide
  VARIANT 3..4: note = Xaa is C or S
SPXXVPQDLSAISILYL

SEQ ID NO: 5690 - protein, 16 aa, synthetic construct
  REGION 1..16: note = GFR-binding peptide
  VARIANT 2..3: note = Xaa is C or S
SXXVPARLNAISILYF

SEQ ID NO: 5691 - protein, 19 aa, synthetic construct
  REGION 1..19: note = GFR-binding peptide
  VARIANT 5..6: note = Xaa is C or S
SASPXXVPQDLNAISILYF

SEQ ID NO: 5692 - protein, 20 aa, synthetic construct
  REGION 1..20: note = GFR-binding peptide
  VARIANT 6..7: note = Xaa is C or S
SIPKAXXVPTELNAISMLYF

SEQ ID NO: 5693 - protein, 19 aa, synthetic construct
  REGION 1..19: note = GFR-binding peptide
  VARIANT 5..6: note = Xaa is C or S
VGKAXXVPTKLSAISVLYL

SEQ ID NO: 5694 - protein, 16 aa, synthetic construct
  REGION 1..16: note = GFR-binding peptide
  VARIANT 2..3: note = Xaa is C or S
PXXVPQALSAISILYL

SEQ ID NO: 5695 - protein, 19 aa, synthetic construct
  REGION 1..19: note = GFR-binding peptide
  VARIANT 5..6: note = Xaa is C or S
APASXXVPARLNAISILYF

SEQ ID NO: 5696 - protein, 16 aa, synthetic construct
  REGION 1..16: note = GFR-binding peptide
  VARIANT 2..3: note = Xaa is C or S
PXXAPTQLSAISVLYL

SEQ ID NO: 5697 - protein, 16 aa, synthetic construct
  REGION 1..16: note = GFR-binding peptide
  VARIANT 2..3: note = Xaa is C or S
AXXVPTELNAISMLYF

SEQ ID NO: 5698 - protein, 11 aa, synthetic construct
  REGION 1..11: note = GFR-binding peptide
ARLNAISILYF

SEQ ID NO: 5699 - protein, 15 aa, synthetic construct
  REGION 1..15: note = GFR-binding peptide
  VARIANT 1..2: note = Xaa is C or S
XXVPQDLSAISILYL

SEQ ID NO: 5700 - protein, 12 aa, synthetic construct
  REGION 1..12: note = GFR-binding peptide
PEKMSAISILYL

SEQ ID NO: 5701 - protein, 10 aa, synthetic construct
  REGION 1..10: note = GFR-binding peptide
DLSAISILYL

SEQ ID NO: 5702 - protein, 17 aa, synthetic construct
  REGION 1..17: note = GFR-binding peptide
  VARIANT 3..4: note = Xaa is C or S
KAXXVPTKLSAISVLYL

SEQ ID NO: 5703 - protein, 20 aa, synthetic construct
  REGION 1..20: note = GFR-binding peptide
  VARIANT 6..7: note = Xaa is C or S
KASKAXXVPTKLNAISILYF

SEQ ID NO: 5704 - protein, 9 aa, synthetic construct
  REGION 1..9: note = GFR-binding peptide
LNAISMLYF

SEQ ID NO: 5705 - protein, 20 aa, synthetic construct
  REGION 1..20: note = GFR-binding peptide
  VARIANT 6..7: note = Xaa is C or S
AVPKAXXAPTKLSAISVLYL

SEQ ID NO: 5706 - protein, 20 aa, synthetic construct
  REGION 1..20: note = GFR-binding peptide
  VARIANT 6..7: note = Xaa is C or S
HVPKPXXAPTKLSAISVLYL

SEQ ID NO: 5707 - protein, 13 aa, synthetic construct
  REGION 1..13: note = GFR-binding peptide
VPARLSAISILYL

SEQ ID NO: 5708 - protein, 15 aa, synthetic construct
  REGION 1..15: note = GFR-binding peptide
  VARIANT 1..2: note = Xaa is C or S
XXVPEKMNAISILYF

SEQ ID NO: 5709 - protein, 13 aa, synthetic construct
  REGION 1..13: note = GFR-binding peptide
VPARLNAISILYF

SEQ ID NO: 5710 - protein, 16 aa, synthetic construct
  REGION 1..16: note = GFR-binding peptide
  VARIANT 2..3: note = Xaa is C or S
AXXVPTKLSAISILYL

SEQ ID NO: 5711 - protein, 16 aa, synthetic construct
  REGION 1..16: note = GFR-binding peptide
  VARIANT 2..3: note = Xaa is C or S
AXXAPTKLNAISVLYF

SEQ ID NO: 5712 - protein, 16 aa, synthetic construct
  REGION 1..16: note = GFR-binding peptide
  VARIANT 2..3: note = Xaa is C or S
AXXVPTKLNAISILYF

SEQ ID NO: 5713 - protein, 12 aa, synthetic construct
  REGION 1..12: note = GFR-binding peptide
PTRLSAISILYL

SEQ ID NO: 5714 - protein, 17 aa, synthetic construct
  REGION 1..17: note = GFR-binding peptide
  VARIANT 3..4: note = Xaa is C or S
APXXVPQALSAISILYL

SEQ ID NO: 5715 - protein, 15 aa, synthetic construct
  REGION 1..15: note = GFR-binding peptide
  VARIANT 1..2: note = Xaa is C or S
XXVPTKLSAISVLYL

SEQ ID NO: 5716 - protein, 16 aa, synthetic construct
  REGION 1..16: note = GFR-binding peptide
  VARIANT 3: note = Xaa is C or S
PTXAPTKLSAISVLYL

SEQ ID NO: 5717 - protein, 20 aa, synthetic construct
  REGION 1..20: note = GFR-binding peptide
  VARIANT 6..7: note = Xaa is C or S
GSAGPXXTPTKMNAISMLYF

SEQ ID NO: 5718 - protein, 15 aa, synthetic construct
  REGION 1..15: note = GFR-binding peptide
  VARIANT 1..2: note = Xaa is C or S
XXVPEKMSAISILYL

SEQ ID NO: 5719 - protein, 14 aa, synthetic construct
  REGION 1..14: note = GFR-binding peptide
  VARIANT 1: note = Xaa is C or S
XVSQDLSAISILYL

SEQ ID NO: 5720 - protein, 15 aa, synthetic construct
  REGION 1..15: note = GFR-binding peptide
  VARIANT 1..2: note = Xaa is C or S
XXVPTKLNAISVLYF

SEQ ID NO: 5721 - protein, 9 aa, synthetic construct
  REGION 1..9: note = GFR-binding peptide
LSAISVLYL

SEQ ID NO: 5722 - protein, 13 aa, synthetic construct
  REGION 1..13: note = GFR-binding peptide
VSQDLSAISILYL

SEQ ID NO: 5723 - protein, 10 aa, synthetic construct
  REGION 1..10: note = GFR-binding peptide
KTNAISMLYF

SEQ ID NO: 5724 - protein, 11 aa, synthetic construct
  REGION 1..11: note = GFR-binding peptide
VKTSAISMLYL

SEQ ID NO: 5725 - protein, 11 aa, synthetic construct
  REGION 1..11: note = GFR-binding peptide
QALSAISILYL

SEQ ID NO: 5726 - protein, 19 aa, synthetic construct
  REGION 1..19: note = GFR-binding peptide
  VARIANT 5..6: note = Xaa is C or S
APASXXVPARLSAISILYL

SEQ ID NO: 5727 - protein, 17 aa, synthetic construct
  REGION 1..17: note = GFR-binding peptide
  VARIANT 3..4: note = Xaa is C or S
ASXXVPARLNAISILYF

SEQ ID NO: 5728 - protein, 17 aa, synthetic construct
  REGION 1..17: note = GFR-binding peptide
  VARIANT 3..4: note = Xaa is C or S
SPXXVPQDLNAISILYF

SEQ ID NO: 5729 - protein, 16 aa, synthetic construct
  REGION 1..16: note = GFR-binding peptide
  VARIANT 2..3: note = Xaa is C or S
AXXAPTKLSAISVLYL

SEQ ID NO: 5730 - protein, 16 aa, synthetic construct
  REGION 1..16: note = GFR-binding peptide
  VARIANT 2..3: note = Xaa is C or S
PXXVPQDLSAISILYL

SEQ ID NO: 5731 - protein, 9 aa, synthetic construct
  REGION 1..9: note = GFR-binding peptide
MNAISILYF

SEQ ID NO: 5732 - protein, 18 aa, synthetic construct
  REGION 1..18: note = GFR-binding peptide
  VARIANT 4..5: note = Xaa is C or S
ASPXXVPQDLSAISILYL

SEQ ID NO: 5733 - protein, 20 aa, synthetic construct
  REGION 1..20: note = GFR-binding peptide
  VARIANT 6..7: note = Xaa is C or S
KVGKAXXVPTKLSAISVLYL

SEQ ID NO: 5734 - protein, 19 aa, synthetic construct
  REGION 1..19: note = GFR-binding peptide
  VARIANT 5..6: note = Xaa is C or S
VPSTXXAPVKTSAISMLYL

SEQ ID NO: 5735 - protein, 15 aa, synthetic construct
  REGION 1..15: note = GFR-binding peptide
  VARIANT 1..2: note = Xaa is C or S
XXVPQALSAISILYL

SEQ ID NO: 5736 - protein, 20 aa, synthetic construct
  REGION 1..20: note = GFR-binding peptide
  VARIANT 6..7: note = Xaa is C or S
ASASPXXVSQDLSAISILYL

SEQ ID NO: 5737 - protein, 18 aa, synthetic construct
  REGION 1..18: note = GFR-binding peptide
  VARIANT 4..5: note = Xaa is C or S
GKAXXVPTKLSAISVLYL

SEQ ID NO: 5738 - protein, 13 aa, synthetic construct
  REGION 1..13: note = GFR-binding peptide
TPTKMNAISMLYF

SEQ ID NO: 5739 - protein, 20 aa, synthetic construct
  REGION 1..20: note = GFR-binding peptide
  VARIANT 6..7: note = Xaa is C or S
RVPSTXXAPVKTNAISMLYF

SEQ ID NO: 5740 - protein, 19 aa, synthetic construct
  REGION 1..19: note = GFR-binding peptide
  VARIANT 5..6: note = Xaa is C or S
ASKAXXVPTKLNAISILYF

SEQ ID NO: 5741 - protein, 18 aa, synthetic construct
  REGION 1..18: note = GFR-binding peptide
  VARIANT 4..5: note = Xaa is C or S
AAPXXVPQALNAISILYF

SEQ ID NO: 5742 - protein, 13 aa, synthetic construct
  REGION 1..13: note = GFR-binding peptide
TPTKMSAISMLYL

SEQ ID NO: 5743 - protein, 18 aa, synthetic construct
  REGION 1..18: note = GFR-binding peptide
  VARIANT 4..5: note = Xaa is C or S
PASXXVPARLNAISILYF

SEQ ID NO: 5744 - protein, 17 aa, synthetic construct
  REGION 1..17: note = GFR-binding peptide
  VARIANT 3..4: note = Xaa is C or S
GPXXTPTKMSAISMLYL

SEQ ID NO: 5745 - protein, 15 aa, synthetic construct
  REGION 1..15: note = GFR-binding peptide
  VARIANT 1..2: note = Xaa is C or S
XXVSQDLNAISILYF

SEQ ID NO: 5746 - protein, 14 aa, synthetic construct
  REGION 1..14: note = GFR-binding peptide
  VARIANT 1: note = Xaa is C or S
XVPTRLNAISILYF

SEQ ID NO: 5747 - protein, 12 aa, synthetic construct
  REGION 1..12: note = GFR-binding peptide
PTKLNAISILYF

SEQ ID NO: 5748 - protein, 12 aa, synthetic construct
  REGION 1..12: note = GFR-binding peptide
PTKLSAISILYL

SEQ ID NO: 5749 - protein, 14 aa, synthetic construct
  REGION 1..14: note = GFR-binding peptide
  VARIANT 1: note = Xaa is C or S
XAPVKTNAISMLYF

SEQ ID NO: 5750 - protein, 18 aa, synthetic construct
  REGION 1..18: note = GFR-binding peptide
  VARIANT 4..5: note = Xaa is C or S
PKAXXVPTELNAISMLYF

SEQ ID NO: 5751 - protein, 14 aa, synthetic construct
  REGION 1..14: note = GFR-binding peptide
  VARIANT 1: note = Xaa is C or S
XVPTRLSAISILYL

SEQ ID NO: 5752 - protein, 13 aa, synthetic construct
  REGION 1..13: note = GFR-binding peptide
VPTKLSAISVLYL

SEQ ID NO: 5753 - protein, 16 aa, synthetic construct
  REGION 1..16: note = GFR-binding peptide
  VARIANT 2..3: note = Xaa is C or S
PXXAPTKLSAISVLYL

SEQ ID NO: 5754 - protein, 13 aa, synthetic construct
  REGION 1..13: note = GFR-binding peptide
VPEKMSAISILYL

SEQ ID NO: 5755 - protein, 11 aa, synthetic construct
  REGION 1..11: note = GFR-binding peptide
QALNAISILYF

SEQ ID NO: 5756 - protein, 20 aa, synthetic construct
  REGION 1..20: note = GFR-binding peptide
  VARIANT 6..7: note = Xaa is C or S
ASASPXXVSQDLNAISILYF

SEQ ID NO: 5757 - protein, 19 aa, synthetic construct
  REGION 1..19: note = GFR-binding peptide
  VARIANT 5..6: note = Xaa is C or S
VPSTXXAPVKTNAISMLYF

SEQ ID NO: 5758 - protein, 10 aa, synthetic construct
  REGION 1..10: note = GFR-binding peptide
KTSAISMLYL

SEQ ID NO: 5759 - protein, 13 aa, synthetic construct
  REGION 1..13: note = GFR-binding peptide
VPEKMNAISILYF

SEQ ID NO: 5760 - protein, 15 aa, synthetic construct
  REGION 1..15: note = GFR-binding peptide
  VARIANT 1..2: note = Xaa is C or S
XXTPTKMSAISMLYL

SEQ ID NO: 5761 - protein, 18 aa, synthetic construct
  REGION 1..18: note = GFR-binding peptide
  VARIANT 4..5: note = Xaa is C or S
GKAXXVPTKLNAISVLYF

SEQ ID NO: 5762 - protein, 15 aa, synthetic construct
  REGION 1..15: note = GFR-binding peptide
  VARIANT 1..2: note = Xaa is C or S
XXVPARLNAISILYF

SEQ ID NO: 5763 - protein, 11 aa, synthetic construct
  REGION 1..11: note = GFR-binding peptide
TQLSAISVLYL

SEQ ID NO: 5764 - protein, 9 aa, synthetic construct
  REGION 1..9: note = GFR-binding peptide
MSAISILYL

SEQ ID NO: 5765 - protein, 13 aa, synthetic construct
  REGION 1..13: note = GFR-binding peptide
VSQDLNAISILYF

SEQ ID NO: 5766 - protein, 14 aa, synthetic construct
  REGION 1..14: note = GFR-binding peptide
  VARIANT 1: note = Xaa is C or S
XAPTQLSAISVLYL

SEQ ID NO: 5767 - protein, 11 aa, synthetic construct
  REGION 1..11: note = GFR-binding peptide
QDLSAISILYL

SEQ ID NO: 5768 - protein, 11 aa, synthetic construct
  REGION 1..11: note = GFR-binding peptide
VKTNAISMLYF

SEQ ID NO: 5769 - protein, 17 aa, synthetic construct
  REGION 1..17: note = GFR-binding peptide
  VARIANT 3..4: note = Xaa is C or S
KAXXVPTELNAISMLYF

SEQ ID NO: 5770 - protein, 12 aa, synthetic construct
  REGION 1..12: note = GFR-binding peptide
PTRLNAISILYF

SEQ ID NO: 5771 - protein, 14 aa, synthetic construct
  REGION 1..14: note = GFR-binding peptide
  VARIANT 1: note = Xaa is C or S
XVPTKLSAISILYL

SEQ ID NO: 5772 - protein, 17 aa, synthetic construct
  REGION 1..17: note = GFR-binding peptide
  VARIANT 3..4: note = Xaa is C or S
APXXVPQALNAISILYF

SEQ ID NO: 5773 - protein, 18 aa, synthetic construct
  REGION 1..18: note = GFR-binding peptide
  VARIANT 4..5: note = Xaa is C or S
ASPXXVPQDLNAISILYF

SEQ ID NO: 5774 - protein, 20 aa, synthetic construct
  REGION 1..20: note = GFR-binding peptide
  VARIANT 6..7: note = Xaa is C or S
TVPKPXXAPTQLSAISVLYL

SEQ ID NO: 5775 - protein, 18 aa, synthetic construct
  REGION 1..18: note = GFR-binding peptide
  VARIANT 4..5: note = Xaa is C or S
AAPXXVPQALSAISILYL

SEQ ID NO: 5776 - protein, 19 aa, synthetic construct
  REGION 1..19: note = GFR-binding peptide
  VARIANT 5..6: note = Xaa is C or S
VPKPXXAPTQLSAISVLYL

SEQ ID NO: 5777 - protein, 11 aa, synthetic construct
  REGION 1..11: note = GFR-binding peptide
TELNAISMLYF

SEQ ID NO: 5778 - protein, 16 aa, synthetic construct
  REGION 1..16: note = GFR-binding peptide
  VARIANT 2..3: note = Xaa is C or S
PXXVPQDLNAISILYF

SEQ ID NO: 5779 - protein, 14 aa, synthetic construct
  REGION 1..14: note = GFR-binding peptide
  VARIANT 1: note = Xaa is C or S
XVPQALSAISILYL

SEQ ID NO: 5780 - protein, 20 aa, synthetic construct
  REGION 1..20: note = GFR-binding peptide
  VARIANT 7: note = Xaa is C or S
HVTKPTXAPTKLSAISVLYL

SEQ ID NO: 5781 - protein, 18 aa, synthetic construct
  REGION 1..18: note = GFR-binding peptide
  VARIANT 4..5: note = Xaa is C or S
PPTXXVPTRLNAISILYF

SEQ ID NO: 5782 - protein, 16 aa, synthetic construct
  REGION 1..16: note = GFR-binding peptide
  VARIANT 2..3: note = Xaa is C or S
PXXTPTKMNAISMLYF

SEQ ID NO: 5783 - protein, 10 aa, synthetic construct
  REGION 1..10: note = GFR-binding peptide
KMSAISILYL

SEQ ID NO: 5784 - protein, 19 aa, synthetic construct
  REGION 1..19: note = GFR-binding peptide
  VARIANT 5..6: note = Xaa is C or S
IPEPXXVPEKMNAISILYF

SEQ ID NO: 5785 - protein, 20 aa, synthetic construct
  REGION 1..20: note = GFR-binding peptide
  VARIANT 6..7: note = Xaa is C or S
GIPEPXXVPEKMSAISILYL

SEQ ID NO: 5786 - protein, 9 aa, synthetic construct
  REGION 1..9: note = GFR-binding peptide
TSAISMLYL

SEQ ID NO: 5787 - protein, 13 aa, synthetic construct
  REGION 1..13: note = GFR-binding peptide
APTKLSAISVLYL

SEQ ID NO: 5788 - protein, 11 aa, synthetic construct
  REGION 1..11: note = GFR-binding peptide
ARLSAISILYL

SEQ ID NO: 5789 - protein, 20 aa, synthetic construct
  REGION 1..20: note = GFR-binding peptide
  VARIANT 6..7: note = Xaa is C or S
AAPASXXVPARLSAISILYL

SEQ ID NO: 5790 - protein, 17 aa, synthetic construct
  REGION 1..17: note = GFR-binding peptide
  VARIANT 3..4: note = Xaa is C or S
KAXXAPTKLNAISVLYF

SEQ ID NO: 5791 - protein, 19 aa, synthetic construct
  REGION 1..19: note = GFR-binding peptide
  VARIANT 5..6: note = Xaa is C or S
SASPXXVSQDLNAISILYF

SEQ ID NO: 5792 - protein, 19 aa, synthetic construct
  REGION 1..19: note = GFR-binding peptide
  VARIANT 5..6: note = Xaa is C or S
VPKAXXAPTKLSAISVLYL

SEQ ID NO: 5793 - protein, 16 aa, synthetic construct
  REGION 1..16: note = GFR-binding peptide
  VARIANT 2..3: note = Xaa is C or S
SXXVPARLSAISILYL

SEQ ID NO: 5794 - protein, 17 aa, synthetic construct
  REGION 1..17: note = GFR-binding peptide
  VARIANT 3..4: note = Xaa is C or S
KAXXVPTKLSAISILYL

SEQ ID NO: 5795 - protein, 14 aa, synthetic construct
  REGION 1..14: note = GFR-binding peptide
  VARIANT 1: note = Xaa is C or S
XTPTKMSAISMLYL

SEQ ID NO: 5796 - protein, 20 aa, synthetic construct
  REGION 1..20: note = GFR-binding peptide
  VARIANT 6..7: note = Xaa is C or S
YVPKPXXAPTKLSAISVLYL

SEQ ID NO: 5797 - protein, 16 aa, synthetic construct
  REGION 1..16: note = GFR-binding peptide
  VARIANT 2..3: note = Xaa is C or S
PXXVPQALNAISILYF

SEQ ID NO: 5798 - protein, 10 aa, synthetic construct
  REGION 1..10: note = GFR-binding peptide
KLSAISVLYL

SEQ ID NO: 5799 - protein, 12 aa, synthetic construct
  REGION 1..12: note = GFR-binding peptide
PTKMSAISMLYL

SEQ ID NO: 5800 - protein, 19 aa, synthetic construct
  REGION 1..19: note = GFR-binding peptide
  VARIANT 5..6: note = Xaa is C or S
SASPXXVPQDLSAISILYL

SEQ ID NO: 5801 - protein, 17 aa, synthetic construct
  REGION 1..17: note = GFR-binding peptide
  VARIANT 3..4: note = Xaa is C or S
KAXXVPTKLNAISVLYF

SEQ ID NO: 5802 - protein, 9 aa, synthetic construct
  REGION 1..9: note = GFR-binding peptide
MNAISMLYF

SEQ ID NO: 5803 - protein, 14 aa, synthetic construct
  REGION 1..14: note = GFR-binding peptide
  VARIANT 1: note = Xaa is C or S
XVPEKMNAISILYF

SEQ ID NO: 5804 - protein, 17 aa, synthetic construct
  REGION 1..17: note = GFR-binding peptide
  VARIANT 3..4: note = Xaa is C or S
PTXXVPTRLSAISILYL

SEQ ID NO: 5805 - protein, 19 aa, synthetic construct
  REGION 1..19: note = GFR-binding peptide
  VARIANT 5..6: note = Xaa is C or S
TPPTXXVPTRLNAISILYF

SEQ ID NO: 5806 - protein, 15 aa, synthetic construct
  REGION 1..15: note = GFR-binding peptide
  VARIANT 1..2: note = Xaa is C or S
XXTPTKMNAISMLYF

SEQ ID NO: 5807 - protein, 15 aa, synthetic construct
  REGION 1..15: note = GFR-binding peptide
  VARIANT 1..2: note = Xaa is C or S
XXVSQDLSAISILYL

SEQ ID NO: 5808 - protein, 20 aa, synthetic construct
  REGION 1..20: note = GFR-binding peptide
  VARIANT 6..7: note = Xaa is C or S
KASKAXXVPTKLSAISILYL

SEQ ID NO: 5809 - protein, 11 aa, synthetic construct
  REGION 1..11: note = GFR-binding peptide
TKMSAISMLYL

SEQ ID NO: 5810 - protein, 10 aa, synthetic construct
  REGION 1..10: note = GFR-binding peptide
KLNAISILYF

SEQ ID NO: 5811 - protein, 17 aa, synthetic construct
  REGION 1..17: note = GFR-binding peptide
  VARIANT 4: note = Xaa is C or S
KPTXAPTKLSAISVLYL

SEQ ID NO: 5812 - protein, 15 aa, synthetic construct
  REGION 1..15: note = GFR-binding peptide
  VARIANT 1..2: note = Xaa is C or S
XXVPQDLNAISILYF

SEQ ID NO: 5813 - protein, 18 aa, synthetic construct
  REGION 1..18: note = GFR-binding peptide
  VARIANT 4..5: note = Xaa is C or S
PEPXXVPEKMNAISILYF

SEQ ID NO: 5814 - protein, 17 aa, synthetic construct
  REGION 1..17: note = GFR-binding peptide
  VARIANT 3..4: note = Xaa is C or S
GPXXTPTKMNAISMLYF

SEQ ID NO: 5815 - protein, 16 aa, synthetic construct
  REGION 1..16: note = GFR-binding peptide
  VARIANT 2..3: note = Xaa is C or S
TXXVPTRLNAISILYF

SEQ ID NO: 5816 - protein, 20 aa, synthetic construct
  REGION 1..20: note = GFR-binding peptide
  VARIANT 6..7: note = Xaa is C or S
STPPTXXVPTRLNAISILYF

SEQ ID NO: 5817 - protein, 11 aa, synthetic construct
  REGION 1..11: note = GFR-binding peptide
TKLSAISVLYL

SEQ ID NO: 5818 - protein, 20 aa, synthetic construct
  REGION 1..20: note = GFR-binding peptide
  VARIANT 6..7: note = Xaa is C or S
KIPKAXXVPTELNAISMLYF

SEQ ID NO: 5819 - protein, 17 aa, synthetic construct
  REGION 1..17: note = GFR-binding peptide
  VARIANT 3..4: note = Xaa is C or S
ASXXVPARLSAISILYL

SEQ ID NO: 5820 - protein, 13 aa, synthetic construct
  REGION 1..13: note = GFR-binding peptide
VPTRLNAISILYF

SEQ ID NO: 5821 - protein, 10 aa, synthetic construct
  REGION 1..10: note = GFR-binding peptide
RLNAISILYF

SEQ ID NO: 5822 - protein, 17 aa, synthetic construct
  REGION 1..17: note = GFR-binding peptide
  VARIANT 3..4: note = Xaa is C or S
KPXXAPTKLSAISVLYL

SEQ ID NO: 5823 - protein, 18 aa, synthetic construct
  REGION 1..18: note = GFR-binding peptide
  VARIANT 4..5: note = Xaa is C or S
PKAXXAPTKLSAISVLYL

SEQ ID NO: 5824 - protein, 12 aa, synthetic construct
  REGION 1..12: note = GFR-binding peptide
SQDLNAISILYF

SEQ ID NO: 5825 - protein, 19 aa, synthetic construct
  REGION 1..19: note = GFR-binding peptide
  VARIANT 5..6: note = Xaa is C or S
SAAPXXVPQALSAISILYL

SEQ ID NO: 5826 - protein, 15 aa, synthetic construct
  REGION 1..15: note = GFR-binding peptide
  VARIANT 1..2: note = Xaa is C or S
XXVPTELNAISMLYF

SEQ ID NO: 5827 - protein, 12 aa, synthetic construct
  REGION 1..12: note = GFR-binding peptide
PARLSAISILYL

SEQ ID NO: 5828 - protein, 20 aa, synthetic construct
  REGION 1..20: note = GFR-binding peptide
  VARIANT 6..7: note = Xaa is C or S
ASASPXXVPQDLSAISILYL

SEQ ID NO: 5829 - protein, 10 aa, synthetic construct
  REGION 1..10: note = GFR-binding peptide
ALNAISILYF

SEQ ID NO: 5830 - protein, 13 aa, synthetic construct
  REGION 1..13: note = GFR-binding peptide
VPTKLNAISILYF

SEQ ID NO: 5831 - protein, 19 aa, synthetic construct
  REGION 1..19: note = GFR-binding peptide
  VARIANT 5..6: note = Xaa is C or S
ASKAXXVPTKLSAISILYL

SEQ ID NO: 5832 - protein, 14 aa, synthetic construct
  REGION 1..14: note = GFR-binding peptide
  VARIANT 1: note = Xaa is C or S
XVPARLSAISILYL

SEQ ID NO: 5833 - protein, 18 aa, synthetic construct
  REGION 1..18: note = GFR-binding peptide
  VARIANT 4..5: note = Xaa is C or S
AGPXXTPTKMNAISMLYF

SEQ ID NO: 5834 - protein, 15 aa, synthetic construct
  REGION 1..15: note = GFR-binding peptide
  VARIANT 1..2: note = Xaa is C or S
XXVPTKLNAISILYF

SEQ ID NO: 5835 - protein, 15 aa, synthetic construct
  REGION 1..15: note = GFR-binding peptide
  VARIANT 1..2: note = Xaa is C or S
XXVPQALNAISILYF

SEQ ID NO: 5836 - protein, 15 aa, synthetic construct
  REGION 1..15: note = GFR-binding peptide
  VARIANT 2: note = Xaa is C or S
TXAPTKLSAISVLYL

SEQ ID NO: 5837 - protein, 13 aa, synthetic construct
  REGION 1..13: note = GFR-binding peptide
VPQDLSAISILYL

SEQ ID NO: 5838 - protein, 13 aa, synthetic construct
  REGION 1..13: note = GFR-binding peptide
VPQALNAISILYF

SEQ ID NO: 5839 - protein, 19 aa, synthetic construct
  REGION 1..19: note = GFR-binding peptide
  VARIANT 5..6: note = Xaa is C or S
SAGPXXTPTKMSAISMLYL

SEQ ID NO: 5840 - protein, 12 aa, synthetic construct
  REGION 1..12: note = GFR-binding peptide
PTKLSAISVLYL

SEQ ID NO: 5841 - protein, 15 aa, synthetic construct
  REGION 1..15: note = GFR-binding peptide
  VARIANT 1..2: note = Xaa is C or S
XXVPTRLSAISILYL

SEQ ID NO: 5842 - protein, 14 aa, synthetic construct
  REGION 1..14: note = GFR-binding peptide
  VARIANT 1: note = Xaa is C or S
XVPQDLSAISILYL

SEQ ID NO: 5843 - protein, 13 aa, synthetic construct
  REGION 1..13: note = GFR-binding peptide
VPTELNAISMLYF

SEQ ID NO: 5844 - protein, 19 aa, synthetic construct
  REGION 1..19: note = GFR-binding peptide
  VARIANT 5..6: note = Xaa is C or S
SAGPXXTPTKMNAISMLYF

SEQ ID NO: 5845 - protein, 18 aa, synthetic construct
  REGION 1..18: note = GFR-binding peptide
  VARIANT 4..5: note = Xaa is C or S
PKPXXAPTKLSAISVLYL

SEQ ID NO: 5846 - protein, 16 aa, synthetic construct
  REGION 1..16: note = GFR-binding peptide
  VARIANT 2..3: note = Xaa is C or S
PXXVPEKMSAISILYL

SEQ ID NO: 5847 - protein, 14 aa, synthetic construct
  REGION 1..14: note = GFR-binding peptide
  VARIANT 1: note = Xaa is C or S
XVSQDLNAISILYF

SEQ ID NO: 5848 - protein, 18 aa, synthetic construct
  REGION 1..18: note = GFR-binding peptide
  VARIANT 4..5: note = Xaa is C or S
SKAXXVPTKLNAISILYF

SEQ ID NO: 5849 - protein, 16 aa, synthetic construct
  REGION 1..16: note = GFR-binding peptide
  VARIANT 2..3: note = Xaa is C or S
PXXVPEKMNAISILYF

SEQ ID NO: 5850 - protein, 10 aa, synthetic construct
  REGION 1..10: note = GFR-binding peptide
KMNAISMLYF

SEQ ID NO: 5851 - protein, 10 aa, synthetic construct
  REGION 1..10: note = GFR-binding peptide
KMSAISMLYL

SEQ ID NO: 5852 - protein, 14 aa, synthetic construct
  REGION 1..14: note = GFR-binding peptide
  VARIANT 1: note = Xaa is C or S
XVPQDLNAISILYF

SEQ ID NO: 5853 - protein, 15 aa, synthetic construct
  REGION 1..15: note = GFR-binding peptide
  VARIANT 1..2: note = Xaa is C or S
XXVPTRLNAISILYF

SEQ ID NO: 5854 - protein, 13 aa, synthetic construct
  REGION 1..13: note = GFR-binding peptide
VPQDLNAISILYF

SEQ ID NO: 5855 - protein, 11 aa, synthetic construct
  REGION 1..11: note = GFR-binding peptide
TRLNAISILYF

SEQ ID NO: 5856 - protein, 15 aa, synthetic construct
  REGION 1..15: note = GFR-binding peptide
  VARIANT 1..2: note = Xaa is C or S
XXVPTKLSAISILYL

SEQ ID NO: 5857 - protein, 16 aa, synthetic construct
  REGION 1..16: note = GFR-binding peptide
  VARIANT 2..3: note = Xaa is C or S
PXXVSQDLNAISILYF

SEQ ID NO: 5858 - protein, 19 aa, synthetic construct
  REGION 1..19: note = GFR-binding peptide
  VARIANT 5..6: note = Xaa is C or S
VGKAXXVPTKLNAISVLYF

SEQ ID NO: 5859 - protein, 15 aa, synthetic construct
  REGION 1..15: note = GFR-binding peptide
  VARIANT 1..2: note = Xaa is C or S
XXAPTKLSAISVLYL

SEQ ID NO: 5860 - protein, 11 aa, synthetic construct
  REGION 1..11: note = GFR-binding peptide
EKMSAISILYL

SEQ ID NO: 5861 - protein, 14 aa, synthetic construct
  REGION 1..14: note = GFR-binding peptide
  VARIANT 1: note = Xaa is C or S
XVPARLNAISILYF

SEQ ID NO: 5862 - protein, 17 aa, synthetic construct
  REGION 1..17: note = GFR-binding peptide
  VARIANT 3..4: note = Xaa is C or S
EPXXVPEKMNAISILYF

SEQ ID NO: 5863 - protein, 12 aa, synthetic construct
  REGION 1..12: note = GFR-binding peptide
PEKMNAISILYF

SEQ ID NO: 5864 - protein, 14 aa, synthetic construct
  REGION 1..14: note = GFR-binding peptide
  VARIANT 1: note = Xaa is C or S
XVPTELNAISMLYF

SEQ ID NO: 5865 - protein, 16 aa, synthetic construct
  REGION 1..16: note = GFR-binding peptide
  VARIANT 2..3: note = Xaa is C or S
AXXVPTKLNAISVLYF

SEQ ID NO: 5866 - protein, 17 aa, synthetic construct
  REGION 1..17: note = GFR-binding peptide
  VARIANT 3..4: note = Xaa is C or S
SPXXVSQDLSAISILYL

SEQ ID NO: 5867 - protein, 9 aa, synthetic construct
  REGION 1..9: note = GFR-binding peptide
LSAISILYL

SEQ ID NO: 5868 - protein, 17 aa, synthetic construct
  REGION 1..17: note = GFR-binding peptide
  VARIANT 3..4: note = Xaa is C or S
STXXAPVKTSAISMLYL

SEQ ID NO: 5869 - protein, 20 aa, synthetic construct
  REGION 1..20: note = GFR-binding peptide
  VARIANT 6..7: note = Xaa is C or S
ASASPXXVPQDLNAISILYF

SEQ ID NO: 5870 - protein, 10 aa, synthetic construct
  REGION 1..10: note = GFR-binding peptide
DLNAISILYF

SEQ ID NO: 5871 - protein, 18 aa, synthetic construct
  REGION 1..18: note = GFR-binding peptide
  VARIANT 4..5: note = Xaa is C or S
PKPXXAPTQLSAISVLYL

SEQ ID NO: 5872 - protein, 18 aa, synthetic construct
  REGION 1..18: note = GFR-binding peptide
  VARIANT 4..5: note = Xaa is C or S
PSTXXAPVKTNAISMLYF

SEQ ID NO: 5873 - protein, 15 aa, synthetic construct
  REGION 1..15: note = GFR-binding peptide
  VARIANT 1..2: note = Xaa is C or S
XXAPTQLSAISVLYL

SEQ ID NO: 5874 - protein, 12 aa, synthetic construct
  REGION 1..12: note = GFR-binding peptide
PTQLSAISVLYL

SEQ ID NO: 5875 - protein, 11 aa, synthetic construct
  REGION 1..11: note = GFR-binding peptide
TKLSAISILYL

SEQ ID NO: 5876 - protein, 20 aa, synthetic construct
  REGION 1..20: note = GFR-binding peptide
  VARIANT 6..7: note = Xaa is C or S
ASAAPXXVPQALNAISILYF

SEQ ID NO: 5877 - protein, 19 aa, synthetic construct
  REGION 1..19: note = GFR-binding peptide
  VARIANT 6: note = Xaa is C or S
VTKPTXAPTKLSAISVLYL

SEQ ID NO: 5878 - protein, 20 aa, synthetic construct
  REGION 1..20: note = GFR-binding peptide
  VARIANT 6..7: note = Xaa is C or S
ASAAPXXVPQALSAISILYL

SEQ ID NO: 5879 - protein, 14 aa, synthetic construct
  REGION 1..14: note = GFR-binding peptide
  VARIANT 1: note = Xaa is C or S
XVPTKLNAISVLYF

SEQ ID NO: 5880 - protein, 18 aa, synthetic construct
  REGION 1..18: note = GFR-binding peptide
  VARIANT 4..5: note = Xaa is C or S
ASPXXVSQDLNAISILYF

SEQ ID NO: 5881 - protein, 16 aa, synthetic construct
  REGION 1..16: note = GFR-binding peptide
  VARIANT 2..3: note = Xaa is C or S
TXXVPTRLSAISILYL

SEQ ID NO: 5882 - protein, 16 aa, synthetic construct
  REGION 1..16: note = GFR-binding peptide
  VARIANT 2..3: note = Xaa is C or S
TXXAPVKTNAISMLYF

SEQ ID NO: 5883 - protein, 13 aa, synthetic construct
  REGION 1..13: note = GFR-binding peptide
APVKTSAISMLYL

SEQ ID NO: 5884 - protein, 12 aa, synthetic construct
  REGION 1..12: note = GFR-binding peptide
PQALSAISILYL

SEQ ID NO: 5885 - protein, 14 aa, synthetic construct
  REGION 1..14: note = GFR-binding peptide
  VARIANT 1: note = Xaa is C or S
XVPTKLSAISVLYL

SEQ ID NO: 5886 - protein, 16 aa, synthetic construct
  REGION 1..16: note = GFR-binding peptide
  VARIANT 2..3: note = Xaa is C or S
AXXVPTKLSAISVLYL

SEQ ID NO: 5887 - protein, 12 aa, synthetic construct
  REGION 1..12: note = GFR-binding peptide
PVKTNAISMLYF

SEQ ID NO: 5888 - protein, 13 aa, synthetic construct
  REGION 1..13: note = GFR-binding peptide
APVKTNAISMLYF

SEQ ID NO: 5889 - protein, 14 aa, synthetic construct
  REGION 1..14: note = GFR-binding peptide
  VARIANT 1: note = Xaa is C or S
XTPTKMNAISMLYF

SEQ ID NO: 5890 - protein, 12 aa, synthetic construct
  REGION 1..12: note = GFR-binding peptide
PQALNAISILYF

SEQ ID NO: 5891 - protein, 12 aa, synthetic construct
  REGION 1..12: note = GFR-binding peptide
PVKTSAISMLYL

SEQ ID NO: 5892 - protein, 12 aa, synthetic construct
  REGION 1..12: note = GFR-binding peptide
PQDLSAISILYL

SEQ ID NO: 5893 - protein, 17 aa, synthetic construct
  REGION 1..17: note = GFR-binding peptide
  VARIANT 3..4: note = Xaa is C or S
KAXXVPTKLNAISILYF

SEQ ID NO: 5894 - protein, 18 aa, synthetic construct
  REGION 1..18: note = GFR-binding peptide
  VARIANT 4..5: note = Xaa is C or S
PSTXXAPVKTSAISMLYL

SEQ ID NO: 5895 - protein, 17 aa, synthetic construct
  REGION 1..17: note = GFR-binding peptide
  VARIANT 3..4: note = Xaa is C or S
PTXXVPTRLNAISILYF

SEQ ID NO: 5896 - protein, 16 aa, synthetic construct
  REGION 1..16: note = GFR-binding peptide
  VARIANT 2..3: note = Xaa is C or S
PXXVSQDLSAISILYL

SEQ ID NO: 5897 - protein, 17 aa, synthetic construct
  REGION 1..17: note = GFR-binding peptide
  VARIANT 3..4: note = Xaa is C or S
EPXXVPEKMSAISILYL

SEQ ID NO: 5898 - protein, 15 aa, synthetic construct
  REGION 1..15: note = GFR-binding peptide
  VARIANT 1..2: note = Xaa is C or S
XXAPVKTSAISMLYL

SEQ ID NO: 5899 - protein, 18 aa, synthetic construct
  REGION 1..18: note = GFR-binding peptide
  VARIANT 4..5: note = Xaa is C or S
SKAXXVPTKLSAISILYL

SEQ ID NO: 5900 - protein, 12 aa, synthetic construct
  REGION 1..12: note = GFR-binding peptide
PTKMNAISMLYF

SEQ ID NO: 5901 - protein, 18 aa, synthetic construct
  REGION 1..18: note = GFR-binding peptide
  VARIANT 5: note = Xaa is C or S
TKPTXAPTKLSAISVLYL

SEQ ID NO: 5902 - protein, 11 aa, synthetic construct
  REGION 1..11: note = GFR-binding peptide
TKLNAISILYF

SEQ ID NO: 5903 - protein, 16 aa, synthetic construct
  REGION 1..16: note = GFR-binding peptide
  VARIANT 2..3: note = Xaa is C or S
TXXAPVKTSAISMLYL

SEQ ID NO: 5904 - protein, 18 aa, synthetic construct
  REGION 1..18: note = GFR-binding peptide
  VARIANT 4..5: note = Xaa is C or S
PPTXXVPTRLSAISILYL

SEQ ID NO: 5905 - protein, 17 aa, synthetic construct
  REGION 1..17: note = GFR-binding peptide
  VARIANT 3..4: note = Xaa is C or S
SPXXVSQDLNAISILYF

SEQ ID NO: 5906 - protein, 18 aa, synthetic construct
  REGION 1..18: note = GFR-binding peptide
  VARIANT 4..5: note = Xaa is C or S
ASPXXVSQDLSAISILYL

SEQ ID NO: 5907 - protein, 17 aa, synthetic construct
  REGION 1..17: note = GFR-binding peptide
  VARIANT 3..4: note = Xaa is C or S
KPXXAPTQLSAISVLYL

SEQ ID NO: 5908 - protein, 17 aa, synthetic construct
  REGION 1..17: note = GFR-binding peptide
  VARIANT 3..4: note = Xaa is C or S
STXXAPVKTNAISMLYF

SEQ ID NO: 5909 - protein, 9 aa, synthetic construct
  REGION 1..9: note = GFR-binding peptide
LNAISILYF

SEQ ID NO: 5910 - protein, 10 aa, synthetic construct
  REGION 1..10: note = GFR-binding peptide
FYLISIANMK

SEQ ID NO: 5911 - protein, 13 aa, synthetic construct
  REGION 1..13: note = GFR-binding peptide
FYLVSIANLKTPA

SEQ ID NO: 5912 - protein, 13 aa, synthetic construct
  REGION 1..13: note = GFR-binding peptide
LYLVSIASLQTPA

SEQ ID NO: 5913 - protein, 14 aa, synthetic construct
  REGION 1..14: note = GFR-binding peptide
  VARIANT 14: note = Xaa is C or S
FYLISIANLAQPVX

SEQ ID NO: 5914 - protein, 16 aa, synthetic construct
  REGION 1..16: note = GFR-binding peptide
  VARIANT 14..15: note = Xaa is C or S
LYLMSIASMKTPTXXP

SEQ ID NO: 5915 - protein, 13 aa, synthetic construct
  REGION 1..13: note = GFR-binding peptide
LYLISIASLKTPV

SEQ ID NO: 5916 - protein, 17 aa, synthetic construct
  REGION 1..17: note = GFR-binding peptide
  VARIANT 14..15: note = Xaa is C or S
LYLVSIASLKTPAXXAK

SEQ ID NO: 5917 - protein, 14 aa, synthetic construct
  REGION 1..14: note = GFR-binding peptide
  VARIANT 14: note = Xaa is C or S
FYLISIANLKTPVX

SEQ ID NO: 5918 - protein, 9 aa, synthetic construct
  REGION 1..9: note = GFR-binding peptide
FYLMSIANT

SEQ ID NO: 5919 - protein, 10 aa, synthetic construct
  REGION 1..10: note = GFR-binding peptide
LYLVSIASLQ

SEQ ID NO: 5920 - protein, 19 aa, synthetic construct
  REGION 1..19: note = GFR-binding peptide
  VARIANT 14..15: note = Xaa is C or S
LYLISIASLDQSVXXPSAS

SEQ ID NO: 5921 - protein, 20 aa, synthetic construct
  REGION 1..20: note = GFR-binding peptide
  VARIANT 14..15: note = Xaa is C or S
FYLISIANMKEPVXXPEPIG

SEQ ID NO: 5922 - protein, 20 aa, synthetic construct
  REGION 1..20: note = GFR-binding peptide
  VARIANT 14..15: note = Xaa is C or S
FYLISIANLRAPVXXSAPAA

SEQ ID NO: 5923 - protein, 14 aa, synthetic construct
  REGION 1..14: note = GFR-binding peptide
  VARIANT 14: note = Xaa is C or S
FYLVSIANLQTPAX

SEQ ID NO: 5924 - protein, 15 aa, synthetic construct
  REGION 1..15: note = GFR-binding peptide
  VARIANT 14..15: note = Xaa is C or S
FYLMSIANTKVPAXX

SEQ ID NO: 5925 - protein, 11 aa, synthetic construct
  REGION 1..11: note = GFR-binding peptide
FYLISIANLDQ

SEQ ID NO: 5926 - protein, 15 aa, synthetic construct
  REGION 1..15: note = GFR-binding peptide
  VARIANT 14..15: note = Xaa is C or S
LYLISIASLRAPVXX

SEQ ID NO: 5927 - protein, 13 aa, synthetic construct
  REGION 1..13: note = GFR-binding peptide
LYLISIASLRTPV

SEQ ID NO: 5928 - protein, 15 aa, synthetic construct
  REGION 1..15: note = GFR-binding peptide
  VARIANT 14..15: note = Xaa is C or S
LYLMSIASLETPVXX

SEQ ID NO: 5929 - protein, 13 aa, synthetic construct
  REGION 1..13: note = GFR-binding peptide
LYLISIASLAQPV

SEQ ID NO: 5930 - protein, 19 aa, synthetic construct
  REGION 1..19: note = GFR-binding peptide
  VARIANT 14..15: note = Xaa is C or S
FYLISIANLAQPVXXPAAS

SEQ ID NO: 5931 - protein, 10 aa, synthetic construct
  REGION 1..10: note = GFR-binding peptide
LYLISIASLA

SEQ ID NO: 5932 - protein, 19 aa, synthetic construct
  REGION 1..19: note = GFR-binding peptide
  VARIANT 14..15: note = Xaa is C or S
LYLISIASMKEPVXXPEPI

SEQ ID NO: 5933 - protein, 12 aa, synthetic construct
  REGION 1..12: note = GFR-binding peptide
FYLMSIANLETP

SEQ ID NO: 5934 - protein, 15 aa, synthetic construct
  REGION 1..15: note = GFR-binding peptide
  VARIANT 14: note = Xaa is C or S
FYLVSIANLKTPAXT

SEQ ID NO: 5935 - protein, 12 aa, synthetic construct
  REGION 1..12: note = GFR-binding peptide
FYLISIANLRAP

SEQ ID NO: 5936 - protein, 20 aa, synthetic construct
  REGION 1..20: note = GFR-binding peptide
  VARIANT 14: note = Xaa is C or S
FYLVSIANLKTPAXTPKTVH

SEQ ID NO: 5937 - protein, 10 aa, synthetic construct
  REGION 1..10: note = GFR-binding peptide
LYLISIASLR

SEQ ID NO: 5938 - protein, 14 aa, synthetic construct
  REGION 1..14: note = GFR-binding peptide
  VARIANT 14: note = Xaa is C or S
LYLISIASMKEPVX

SEQ ID NO: 5939 - protein, 11 aa, synthetic construct
  REGION 1..11: note = GFR-binding peptide
FYLMSIANMKT

SEQ ID NO: 5940 - protein, 10 aa, synthetic construct
  REGION 1..10: note = GFR-binding peptide
FYLMSIANLE

SEQ ID NO: 5941 - protein, 18 aa, synthetic construct
  REGION 1..18: note = GFR-binding peptide
  VARIANT 14..15: note = Xaa is C or S
LYLISIASLRAPVXXSAP

SEQ ID NO: 5942 - protein, 18 aa, synthetic construct
  REGION 1..18: note = GFR-binding peptide
  VARIANT 14..15: note = Xaa is C or S
LYLISIASMKEPVXXPEP

SEQ ID NO: 5943 - protein, 18 aa, synthetic construct
  REGION 1..18: note = GFR-binding peptide
  VARIANT 14..15: note = Xaa is C or S
LYLMSIASMKTPTXXPGA

SEQ ID NO: 5944 - protein, 20 aa, synthetic construct
  REGION 1..20: note = GFR-binding peptide
  VARIANT 14..15: note = Xaa is C or S
LYLISIASLRTPVXXTPPTS

SEQ ID NO: 5945 - protein, 16 aa, synthetic construct
  REGION 1..16: note = GFR-binding peptide
  VARIANT 14..15: note = Xaa is C or S
FYLVSIANLKTPAXXP

SEQ ID NO: 5946 - protein, 12 aa, synthetic construct
  REGION 1..12: note = GFR-binding peptide
LYLISIASLDQS

SEQ ID NO: 5947 - protein, 14 aa, synthetic construct
  REGION 1..14: note = GFR-binding peptide
  VARIANT 14: note = Xaa is C or S
LYLMSIASTKVPAX

SEQ ID NO: 5948 - protein, 18 aa, synthetic construct
  REGION 1..18: note = GFR-binding peptide
  VARIANT 14..15: note = Xaa is C or S
FYLVSIANLKTPAXXAKP

SEQ ID NO: 5949 - protein, 13 aa, synthetic construct
  REGION 1..13: note = GFR-binding peptide
FYLVSIANLKTPV

SEQ ID NO: 5950 - protein, 19 aa, synthetic construct
  REGION 1..19: note = GFR-binding peptide
  VARIANT 14..15: note = Xaa is C or S
FYLVSIANLKTPAXXAKPV

SEQ ID NO: 5951 - protein, 10 aa, synthetic construct
  REGION 1..10: note = GFR-binding peptide
LYLISIASLK

SEQ ID NO: 5952 - protein, 12 aa, synthetic construct
  REGION 1..12: note = GFR-binding peptide
FYLISIANLDQP

SEQ ID NO: 5953 - protein, 11 aa, synthetic construct
  REGION 1..11: note = GFR-binding peptide
FYLISIANMKE

SEQ ID NO: 5954 - protein, 11 aa, synthetic construct
  REGION 1..11: note = GFR-binding peptide
LYLISIASLRT

SEQ ID NO: 5955 - protein, 14 aa, synthetic construct
  REGION 1..14: note = GFR-binding peptide
  VARIANT 14: note = Xaa is C or S
LYLVSIASLKTPAX

SEQ ID NO: 5956 - protein, 9 aa, synthetic construct
  REGION 1..9: note = GFR-binding peptide
LYLMSIASM

SEQ ID NO: 5957 - protein, 19 aa, synthetic construct
  REGION 1..19: note = GFR-binding peptide
  VARIANT 14..15: note = Xaa is C or S
LYLVSIASLKTPAXXPKPV

SEQ ID NO: 5958 - protein, 19 aa, synthetic construct
  REGION 1..19: note = GFR-binding peptide
  VARIANT 14..15: note = Xaa is C or S
LYLISIASLRTPVXXTPPT

SEQ ID NO: 5959 - protein, 19 aa, synthetic construct
  REGION 1..19: note = GFR-binding peptide
  VARIANT 14..15: note = Xaa is C or S
FYLMSIANLETPVXXAKPI

SEQ ID NO: 5960 - protein, 17 aa, synthetic construct
  REGION 1..17: note = GFR-binding peptide
  VARIANT 14..15: note = Xaa is C or S
LYLISIASLDQPVXXPS

SEQ ID NO: 5961 - protein, 16 aa, synthetic construct
  REGION 1..16: note = GFR-binding peptide
  VARIANT 14..15: note = Xaa is C or S
FYLISIANLRAPVXXS

SEQ ID NO: 5962 - protein, 19 aa, synthetic construct
  REGION 1..19: note = GFR-binding peptide
  VARIANT 14..15: note = Xaa is C or S
FYLISIANLDQPVXXPSAS

SEQ ID NO: 5963 - protein, 20 aa, synthetic construct
  REGION 1..20: note = GFR-binding peptide
  VARIANT 14..15: note = Xaa is C or S
FYLMSIANLETPVXXAKPIS

SEQ ID NO: 5964 - protein, 19 aa, synthetic construct
  REGION 1..19: note = GFR-binding peptide
  VARIANT 14..15: note = Xaa is C or S
LYLVSIASLKTPVXXAKGV

SEQ ID NO: 5965 - protein, 10 aa, synthetic construct
  REGION 1..10: note = GFR-binding peptide
FYLVSIANLK

SEQ ID NO: 5966 - protein, 16 aa, synthetic construct
  REGION 1..16: note = GFR-binding peptide
  VARIANT 14..15: note = Xaa is C or S
LYLISIASLAQPVXXP

SEQ ID NO: 5967 - protein, 19 aa, synthetic construct
  REGION 1..19: note = GFR-binding peptide
  VARIANT 14..15: note = Xaa is C or S
FYLISIANLRAPVXXSAPA

SEQ ID NO: 5968 - protein, 16 aa, synthetic construct
  REGION 1..16: note = GFR-binding peptide
  VARIANT 14..15: note = Xaa is C or S
LYLVSIASLQTPAXXP

SEQ ID NO: 5969 - protein, 16 aa, synthetic construct
  REGION 1..16: note = GFR-binding peptide
  VARIANT 14..15: note = Xaa is C or S
FYLMSIANLETPVXXA

SEQ ID NO: 5970 - protein, 11 aa, synthetic construct
  REGION 1..11: note = GFR-binding peptide
FYLISIANLRA

SEQ ID NO: 5971 - protein, 18 aa, synthetic construct
  REGION 1..18: note = GFR-binding peptide
  VARIANT 14..15: note = Xaa is C or S
FYLVSIANLQTPAXXPKP

SEQ ID NO: 5972 - protein, 15 aa, synthetic construct
  REGION 1..15: note = GFR-binding peptide
  VARIANT 14..15: note = Xaa is C or S
LYLISIASLDQPVXX

SEQ ID NO: 5973 - protein, 12 aa, synthetic construct
  REGION 1..12: note = GFR-binding peptide
LYLISIASMKEP

SEQ ID NO: 5974 - protein, 10 aa, synthetic construct
  REGION 1..10: note = GFR-binding peptide
LYLISIASLD

SEQ ID NO: 5975 - protein, 17 aa, synthetic construct
  REGION 1..17: note = GFR-binding peptide
  VARIANT 14..15: note = Xaa is C or S
LYLVSIASLKTPVXXAK

SEQ ID NO: 5976 - protein, 20 aa, synthetic construct
  REGION 1..20: note = GFR-binding peptide
  VARIANT 14..15: note = Xaa is C or S
FYLISIANLKTPVXXAKSAK

SEQ ID NO: 5977 - protein, 9 aa, synthetic construct
  REGION 1..9: note = GFR-binding peptide
FYLMSIANL

SEQ ID NO: 5978 - protein, 20 aa, synthetic construct
  REGION 1..20: note = GFR-binding peptide
  VARIANT 14..15: note = Xaa is C or S
LYLVSIASLKTPAXXAKPVA

SEQ ID NO: 5979 - protein, 9 aa, synthetic construct
  REGION 1..9: note = GFR-binding peptide
FYLVSIANL

SEQ ID NO: 5980 - protein, 20 aa, synthetic construct
  REGION 1..20: note = GFR-binding peptide
  VARIANT 14..15: note = Xaa is C or S
LYLVSIASLKTPAXXPKPVH

SEQ ID NO: 5981 - protein, 13 aa, synthetic construct
  REGION 1..13: note = GFR-binding peptide
LYLISIASLRAPV

SEQ ID NO: 5982 - protein, 15 aa, synthetic construct
  REGION 1..15: note = GFR-binding peptide
  VARIANT 14..15: note = Xaa is C or S
FYLISIANMKEPVXX

SEQ ID NO: 5983 - protein, 13 aa, synthetic construct
  REGION 1..13: note = GFR-binding peptide
LYLMSIASLETPV

SEQ ID NO: 5984 - protein, 13 aa, synthetic construct
  REGION 1..13: note = GFR-binding peptide
FYLISIANLRAPV

SEQ ID NO: 5985 - protein, 16 aa, synthetic construct
  REGION 1..16: note = GFR-binding peptide
  VARIANT 14..15: note = Xaa is C or S
LYLISIASLKTPVXXA

SEQ ID NO: 5986 - protein, 20 aa, synthetic construct
  REGION 1..20: note = GFR-binding peptide
  VARIANT 14..15: note = Xaa is C or S
FYLVSIANLKTPAXXPKPVH

SEQ ID NO: 5987 - protein, 16 aa, synthetic construct
  REGION 1..16: note = GFR-binding peptide
  VARIANT 14..15: note = Xaa is C or S
FYLVSIANLKTPAXXA

SEQ ID NO: 5988 - protein, 16 aa, synthetic construct
  REGION 1..16: note = GFR-binding peptide
  VARIANT 14..15: note = Xaa is C or S
FYLISIANLKTPVXXA

SEQ ID NO: 5989 - protein, 12 aa, synthetic construct
  REGION 1..12: note = GFR-binding peptide
LYLISIASLRTP

SEQ ID NO: 5990 - protein, 17 aa, synthetic construct
  REGION 1..17: note = GFR-binding peptide
  VARIANT 14..15: note = Xaa is C or S
LYLISIASLAQPVXXPA

SEQ ID NO: 5991 - protein, 15 aa, synthetic construct
  REGION 1..15: note = GFR-binding peptide
  VARIANT 14..15: note = Xaa is C or S
LYLVSIASLKTPVXX

SEQ ID NO: 5992 - protein, 16 aa, synthetic construct
  REGION 1..16: note = GFR-binding peptide
  VARIANT 14: note = Xaa is C or S
LYLVSIASLKTPAXTP

SEQ ID NO: 5993 - protein, 20 aa, synthetic construct
  REGION 1..20: note = GFR-binding peptide
  VARIANT 14..15: note = Xaa is C or S
FYLMSIANMKTPTXXPGASG

SEQ ID NO: 5994 - protein, 15 aa, synthetic construct
  REGION 1..15: note = GFR-binding peptide
  VARIANT 14..15: note = Xaa is C or S
LYLISIASMKEPVXX

SEQ ID NO: 5995 - protein, 14 aa, synthetic construct
  REGION 1..14: note = GFR-binding peptide
  VARIANT 14: note = Xaa is C or S
LYLISIASLDQSVX

SEQ ID NO: 5996 - protein, 15 aa, synthetic construct
  REGION 1..15: note = GFR-binding peptide
  VARIANT 14..15: note = Xaa is C or S
FYLVSIANLKTPVXX

SEQ ID NO: 5997 - protein, 9 aa, synthetic construct
  REGION 1..9: note = GFR-binding peptide
LYLVSIASL

SEQ ID NO: 5998 - protein, 16 aa, synthetic construct
  REGION 1..16: note = GFR-binding peptide
  VARIANT 14: note = Xaa is C or S
FYLVSIANLKTPAXTP

SEQ ID NO: 5999 - protein, 13 aa, synthetic construct
  REGION 1..13: note = GFR-binding peptide
LYLISIASLDQSV

SEQ ID NO: 6000 - protein, 10 aa, synthetic construct
  REGION 1..10: note = GFR-binding peptide
FYLMSIANTK

SEQ ID NO: 6001 - protein, 11 aa, synthetic construct
  REGION 1..11: note = GFR-binding peptide
LYLMSIASTKV

SEQ ID NO: 6002 - protein, 11 aa, synthetic construct
  REGION 1..11: note = GFR-binding peptide
LYLISIASLAQ

SEQ ID NO: 6003 - protein, 19 aa, synthetic construct
  REGION 1..19: note = GFR-binding peptide
  VARIANT 14..15: note = Xaa is C or S
LYLISIASLRAPVXXSAPA

SEQ ID NO: 6004 - protein, 11 aa, synthetic construct
  REGION 1..11: note = GFR-binding peptide
FYLVSIANLKT

SEQ ID NO: 6005 - protein, 19 aa, synthetic construct
  REGION 1..19: note = GFR-binding peptide
  VARIANT 14..15: note = Xaa is C or S
FYLVSIANLQTPAXXPKPV

SEQ ID NO: 6006 - protein, 17 aa, synthetic construct
  REGION 1..17: note = GFR-binding peptide
  VARIANT 14..15: note = Xaa is C or S
FYLISIANLRAPVXXSA

SEQ ID NO: 6007 - protein, 17 aa, synthetic construct
  REGION 1..17: note = GFR-binding peptide
  VARIANT 14..15: note = Xaa is C or S
FYLISIANLDQPVXXPS

SEQ ID NO: 6008 - protein, 16 aa, synthetic construct
  REGION 1..16: note = GFR-binding peptide
  VARIANT 14..15: note = Xaa is C or S
LYLVSIASLKTPAXXA

SEQ ID NO: 6009 - protein, 17 aa, synthetic construct
  REGION 1..17: note = GFR-binding peptide
  VARIANT 14..15: note = Xaa is C or S
LYLMSIASLETPVXXAK

SEQ ID NO: 6010 - protein, 16 aa, synthetic construct
  REGION 1..16: note = GFR-binding peptide
  VARIANT 14..15: note = Xaa is C or S
LYLISIASLDQPVXXP

SEQ ID NO: 6011 - protein, 9 aa, synthetic construct
  REGION 1..9: note = GFR-binding peptide
FYLISIANM

SEQ ID NO: 6012 - protein, 18 aa, synthetic construct
  REGION 1..18: note = GFR-binding peptide
  VARIANT 14..15: note = Xaa is C or S
LYLISIASLDQPVXXPSA

SEQ ID NO: 6013 - protein, 20 aa, synthetic construct
  REGION 1..20: note = GFR-binding peptide
  VARIANT 14..15: note = Xaa is C or S
LYLVSIASLKTPVXXAKGVK

SEQ ID NO: 6014 - protein, 19 aa, synthetic construct
  REGION 1..19: note = GFR-binding peptide
  VARIANT 14..15: note = Xaa is C or S
LYLMSIASTKVPAXXTSPV

SEQ ID NO: 6015 - protein, 15 aa, synthetic construct
  REGION 1..15: note = GFR-binding peptide
  VARIANT 14..15: note = Xaa is C or S
LYLISIASLAQPVXX

SEQ ID NO: 6016 - protein, 11 aa, synthetic construct
  REGION 1..11: note = GFR-binding peptide
FYLVSIANLQT

SEQ ID NO: 6017 - protein, 20 aa, synthetic construct
  REGION 1..20: note = GFR-binding peptide
  VARIANT 14..15: note = Xaa is C or S
LYLISIASLDQSVXXPSASA

SEQ ID NO: 6018 - protein, 18 aa, synthetic construct
  REGION 1..18: note = GFR-binding peptide
  VARIANT 14..15: note = Xaa is C or S
LYLVSIASLKTPVXXAKG

SEQ ID NO: 6019 - protein, 13 aa, synthetic construct
  REGION 1..13: note = GFR-binding peptide
FYLMSIANMKTPT

SEQ ID NO: 6020 - protein, 20 aa, synthetic construct
  REGION 1..20: note = GFR-binding peptide
  VARIANT 14..15: note = Xaa is C or S
FYLMSIANTKVPAXXTSPVR

SEQ ID NO: 6021 - protein, 19 aa, synthetic construct
  REGION 1..19: note = GFR-binding peptide
  VARIANT 14..15: note = Xaa is C or S
FYLVSIANLKTPAXXPKPV

SEQ ID NO: 6022 - protein, 20 aa, synthetic construct
  REGION 1..20: note = GFR-binding peptide
  VARIANT 14..15: note = Xaa is C or S
FYLVSIANLQTPAXXPKPVT

SEQ ID NO: 6023 - protein, 19 aa, synthetic construct
  REGION 1..19: note = GFR-binding peptide
  VARIANT 14..15: note = Xaa is C or S
FYLISIANLKTPVXXAKSA

SEQ ID NO: 6024 - protein, 18 aa, synthetic construct
  REGION 1..18: note = GFR-binding peptide
  VARIANT 14..15: note = Xaa is C or S
FYLISIANLAQPVXXPAA

SEQ ID NO: 6025 - protein, 13 aa, synthetic construct
  REGION 1..13: note = GFR-binding peptide
LYLMSIASMKTPT

SEQ ID NO: 6026 - protein, 18 aa, synthetic construct
  REGION 1..18: note = GFR-binding peptide
  VARIANT 14..15: note = Xaa is C or S
FYLISIANLRAPVXXSAP

SEQ ID NO: 6027 - protein, 17 aa, synthetic construct
  REGION 1..17: note = GFR-binding peptide
  VARIANT 14..15: note = Xaa is C or S
LYLMSIASMKTPTXXPG

SEQ ID NO: 6028 - protein, 15 aa, synthetic construct
  REGION 1..15: note = GFR-binding peptide
  VARIANT 14..15: note = Xaa is C or S
FYLISIANLDQSVXX

SEQ ID NO: 6029 - protein, 14 aa, synthetic construct
  REGION 1..14: note = GFR-binding peptide
  VARIANT 14: note = Xaa is C or S
FYLISIANLRTPVX

SEQ ID NO: 6030 - protein, 12 aa, synthetic construct
  REGION 1..12: note = GFR-binding peptide
FYLISIANLKTP

SEQ ID NO: 6031 - protein, 12 aa, synthetic construct
  REGION 1..12: note = GFR-binding peptide
LYLISIASLKTP

SEQ ID NO: 6032 - protein, 14 aa, synthetic construct
  REGION 1..14: note = GFR-binding peptide
  VARIANT 14: note = Xaa is C or S
FYLMSIANTKVPAX

SEQ ID NO: 6033 - protein, 18 aa, synthetic construct
  REGION 1..18: note = GFR-binding peptide
  VARIANT 14..15: note = Xaa is C or S
FYLMSIANLETPVXXAKP

SEQ ID NO: 6034 - protein, 17 aa, synthetic construct
  REGION 1..17: note = GFR-binding peptide
  VARIANT 14: note = Xaa is C or S
FYLVSIANLKTPAXTPK

SEQ ID NO: 6035 - protein, 14 aa, synthetic construct
  REGION 1..14: note = GFR-binding peptide
  VARIANT 14: note = Xaa is C or S
LYLISIASLRTPVX

SEQ ID NO: 6036 - protein, 13 aa, synthetic construct
  REGION 1..13: note = GFR-binding peptide
LYLVSIASLKTPV

SEQ ID NO: 6037 - protein, 16 aa, synthetic construct
  REGION 1..16: note = GFR-binding peptide
  VARIANT 14..15: note = Xaa is C or S
LYLVSIASLKTPAXXP

SEQ ID NO: 6038 - protein, 13 aa, synthetic construct
  REGION 1..13: note = GFR-binding peptide
LYLISIASMKEPV

SEQ ID NO: 6039 - protein, 11 aa, synthetic construct
  REGION 1..11: note = GFR-binding peptide
FYLISIANLAQ

SEQ ID NO: 6040 - protein, 20 aa, synthetic construct
  REGION 1..20: note = GFR-binding peptide
  VARIANT 14..15: note = Xaa is C or S
FYLISIANLDQSVXXPSASA

SEQ ID NO: 6041 - protein, 19 aa, synthetic construct
  REGION 1..19: note = GFR-binding peptide
  VARIANT 14..15: note = Xaa is C or S
FYLMSIANTKVPAXXTSPV

SEQ ID NO: 6042 - protein, 10 aa, synthetic construct
  REGION 1..10: note = GFR-binding peptide
LYLMSIASTK

SEQ ID NO: 6043 - protein, 13 aa, synthetic construct
  REGION 1..13: note = GFR-binding peptide
FYLISIANMKEPV

SEQ ID NO: 6044 - protein, 15 aa, synthetic construct
  REGION 1..15: note = GFR-binding peptide
  VARIANT 14..15: note = Xaa is C or S
LYLMSIASMKTPTXX

SEQ ID NO: 6045 - protein, 18 aa, synthetic construct
  REGION 1..18: note = GFR-binding peptide
  VARIANT 14..15: note = Xaa is C or S
FYLVSIANLKTPVXXAKG

SEQ ID NO: 6046 - protein, 15 aa, synthetic construct
  REGION 1..15: note = GFR-binding peptide
  VARIANT 14..15: note = Xaa is C or S
FYLISIANLRAPVXX

SEQ ID NO: 6047 - protein, 11 aa, synthetic construct
  REGION 1..11: note = GFR-binding peptide
LYLVSIASLQT

SEQ ID NO: 6048 - protein, 9 aa, synthetic construct
  REGION 1..9: note = GFR-binding peptide
LYLISIASM

SEQ ID NO: 6049 - protein, 13 aa, synthetic construct
  REGION 1..13: note = GFR-binding peptide
FYLISIANLDQSV

SEQ ID NO: 6050 - protein, 14 aa, synthetic construct
  REGION 1..14: note = GFR-binding peptide
  VARIANT 14: note = Xaa is C or S
LYLVSIASLQTPAX

SEQ ID NO: 6051 - protein, 11 aa, synthetic construct
  REGION 1..11: note = GFR-binding peptide
LYLISIASLDQ

SEQ ID NO: 6052 - protein, 11 aa, synthetic construct
  REGION 1..11: note = GFR-binding peptide
FYLMSIANTKV

SEQ ID NO: 6053 - protein, 17 aa, synthetic construct
  REGION 1..17: note = GFR-binding peptide
  VARIANT 14..15: note = Xaa is C or S
FYLMSIANLETPVXXAK

SEQ ID NO: 6054 - protein, 12 aa, synthetic construct
  REGION 1..12: note = GFR-binding peptide
FYLISIANLRTP

SEQ ID NO: 6055 - protein, 14 aa, synthetic construct
  REGION 1..14: note = GFR-binding peptide
  VARIANT 14: note = Xaa is C or S
LYLISIASLKTPVX

SEQ ID NO: 6056 - protein, 17 aa, synthetic construct
  REGION 1..17: note = GFR-binding peptide
  VARIANT 14..15: note = Xaa is C or S
FYLISIANLAQPVXXPA

SEQ ID NO: 6057 - protein, 18 aa, synthetic construct
  REGION 1..18: note = GFR-binding peptide
  VARIANT 14..15: note = Xaa is C or S
FYLISIANLDQPVXXPSA

SEQ ID NO: 6058 - protein, 20 aa, synthetic construct
  REGION 1..20: note = GFR-binding peptide
  VARIANT 14..15: note = Xaa is C or S
LYLVSIASLQTPAXXPKPVT

SEQ ID NO: 6059 - protein, 18 aa, synthetic construct
  REGION 1..18: note = GFR-binding peptide
  VARIANT 14..15: note = Xaa is C or S
LYLMSIASLETPVXXAKP

SEQ ID NO: 6060 - protein, 18 aa, synthetic construct
  REGION 1..18: note = GFR-binding peptide
  VARIANT 14..15: note = Xaa is C or S
LYLISIASLAQPVXXPAA

SEQ ID NO: 6061 - protein, 19 aa, synthetic construct
  REGION 1..19: note = GFR-binding peptide
  VARIANT 14..15: note = Xaa is C or S
LYLVSIASLQTPAXXPKPV

SEQ ID NO: 6062 - protein, 11 aa, synthetic construct
  REGION 1..11: note = GFR-binding peptide
FYLMSIANLET

SEQ ID NO: 6063 - protein, 16 aa, synthetic construct
  REGION 1..16: note = GFR-binding peptide
  VARIANT 14..15: note = Xaa is C or S
FYLISIANLDQPVXXP

SEQ ID NO: 6064 - protein, 14 aa, synthetic construct
  REGION 1..14: note = GFR-binding peptide
  VARIANT 14: note = Xaa is C or S
LYLISIASLAQPVX

SEQ ID NO: 6065 - protein, 11 aa, synthetic construct
  REGION 1..11: note = GFR-binding peptide
LYLMSIASLET

SEQ ID NO: 6066 - protein, 20 aa, synthetic construct
  REGION 1..20: note = GFR-binding peptide
  VARIANT 14: note = Xaa is C or S
LYLVSIASLKTPAXTPKTVH

SEQ ID NO: 6067 - protein, 18 aa, synthetic construct
  REGION 1..18: note = GFR-binding peptide
  VARIANT 14..15: note = Xaa is C or S
FYLISIANLRTPVXXTPP

SEQ ID NO: 6068 - protein, 16 aa, synthetic construct
  REGION 1..16: note = GFR-binding peptide
  VARIANT 14..15: note = Xaa is C or S
FYLMSIANMKTPTXXP

SEQ ID NO: 6069 - protein, 10 aa, synthetic construct
  REGION 1..10: note = GFR-binding peptide
LYLISIASMK

SEQ ID NO: 6070 - protein, 19 aa, synthetic construct
  REGION 1..19: note = GFR-binding peptide
  VARIANT 14..15: note = Xaa is C or S
FYLISIANMKEPVXXPEPI

SEQ ID NO: 6071 - protein, 20 aa, synthetic construct
  REGION 1..20: note = GFR-binding peptide
  VARIANT 14..15: note = Xaa is C or S
LYLISIASMKEPVXXPEPIG

SEQ ID NO: 6072 - protein, 9 aa, synthetic construct
  REGION 1..9: note = GFR-binding peptide
LYLMSIAST

SEQ ID NO: 6073 - protein, 13 aa, synthetic construct
  REGION 1..13: note = GFR-binding peptide
LYLVSIASLKTPA

SEQ ID NO: 6074 - protein, 11 aa, synthetic construct
  REGION 1..11: note = GFR-binding peptide
LYLISIASLRA

SEQ ID NO: 6075 - protein, 10 aa, synthetic construct
  REGION 1..10: note = GFR-binding peptide
FYLVSIANLQ

SEQ ID NO: 6076 - protein, 20 aa, synthetic construct
  REGION 1..20: note = GFR-binding peptide
  VARIANT 14..15: note = Xaa is C or S
LYLISIASLRAPVXXSAPAA

SEQ ID NO: 6077 - protein, 17 aa, synthetic construct
  REGION 1..17: note = GFR-binding peptide
  VARIANT 14..15: note = Xaa is C or S
FYLVSIANLKTPAXXAK

SEQ ID NO: 6078 - protein, 19 aa, synthetic construct
  REGION 1..19: note = GFR-binding peptide
  VARIANT 14..15: note = Xaa is C or S
FYLISIANLDQSVXXPSAS

SEQ ID NO: 6079 - protein, 19 aa, synthetic construct
  REGION 1..19: note = GFR-binding peptide
  VARIANT 14..15: note = Xaa is C or S
LYLVSIASLKTPAXXAKPV

SEQ ID NO: 6080 - protein, 16 aa, synthetic construct
  REGION 1..16: note = GFR-binding peptide
  VARIANT 14..15: note = Xaa is C or S
LYLISIASLRAPVXXS

SEQ ID NO: 6081 - protein, 14 aa, synthetic construct
  REGION 1..14: note = GFR-binding peptide
  VARIANT 14: note = Xaa is C or S
FYLVSIANLKTPAX

SEQ ID NO: 6082 - protein, 17 aa, synthetic construct
  REGION 1..17: note = GFR-binding peptide
  VARIANT 14..15: note = Xaa is C or S
LYLISIASLKTPVXXAK

SEQ ID NO: 6083 - protein, 14 aa, synthetic construct
  REGION 1..14: note = GFR-binding peptide
  VARIANT 14: note = Xaa is C or S
LYLMSIASMKTPTX

SEQ ID NO: 6084 - protein, 20 aa, synthetic construct
  REGION 1..20: note = GFR-binding peptide
  VARIANT 14..15: note = Xaa is C or S
LYLVSIASLKTPAXXPKPVY

SEQ ID NO: 6085 - protein, 16 aa, synthetic construct
  REGION 1..16: note = GFR-binding peptide
  VARIANT 14..15: note = Xaa is C or S
FYLISIANLAQPVXXP

SEQ ID NO: 6086 - protein, 10 aa, synthetic construct
  REGION 1..10: note = GFR-binding peptide
LYLVSIASLK

SEQ ID NO: 6087 - protein, 12 aa, synthetic construct
  REGION 1..12: note = GFR-binding peptide
LYLMSIASMKTP

SEQ ID NO: 6088 - protein, 20 aa, synthetic construct
  REGION 1..20: note = GFR-binding peptide
  VARIANT 14..15: note = Xaa is C or S
LYLMSIASLETPVXXAKPIS

SEQ ID NO: 6089 - protein, 19 aa, synthetic construct
  REGION 1..19: note = GFR-binding peptide
  VARIANT 14..15: note = Xaa is C or S
LYLISIASLDQPVXXPSAS

SEQ ID NO: 6090 - protein, 9 aa, synthetic construct
  REGION 1..9: note = GFR-binding peptide
LYLMSIASL

SEQ ID NO: 6091 - protein, 17 aa, synthetic construct
  REGION 1..17: note = GFR-binding peptide
  VARIANT 14..15: note = Xaa is C or S
FYLVSIANLKTPVXXAK

SEQ ID NO: 6092 - protein, 9 aa, synthetic construct
  REGION 1..9: note = GFR-binding peptide
FYLMSIANM

SEQ ID NO: 6093 - protein, 14 aa, synthetic construct
  REGION 1..14: note = GFR-binding peptide
  VARIANT 14: note = Xaa is C or S
FYLISIANMKEPVX

SEQ ID NO: 6094 - protein, 17 aa, synthetic construct
  REGION 1..17: note = GFR-binding peptide
  VARIANT 14..15: note = Xaa is C or S
LYLISIASLRTPVXXTP

SEQ ID NO: 6095 - protein, 19 aa, synthetic construct
  REGION 1..19: note = GFR-binding peptide
  VARIANT 14..15: note = Xaa is C or S
FYLISIANLRTPVXXTPPT

SEQ ID NO: 6096 - protein, 16 aa, synthetic construct
  REGION 1..16: note = GFR-binding peptide
  VARIANT 14..15: note = Xaa is C or S
LYLMSIASLETPVXXA

SEQ ID NO: 6097 - protein, 15 aa, synthetic construct
  REGION 1..15: note = GFR-binding peptide
  VARIANT 14..15: note = Xaa is C or S
FYLMSIANMKTPTXX

SEQ ID NO: 6098 - protein, 15 aa, synthetic construct
  REGION 1..15: note = GFR-binding peptide
  VARIANT 14..15: note = Xaa is C or S
LYLISIASLDQSVXX

SEQ ID NO: 6099 - protein, 20 aa, synthetic construct
  REGION 1..20: note = GFR-binding peptide
  VARIANT 14..15: note = Xaa is C or S
LYLISIASLKTPVXXAKSAK

SEQ ID NO: 6100 - protein, 11 aa, synthetic construct
  REGION 1..11: note = GFR-binding peptide
LYLMSIASMKT

SEQ ID NO: 6101 - protein, 10 aa, synthetic construct
  REGION 1..10: note = GFR-binding peptide
FYLISIANLK

SEQ ID NO: 6102 - protein, 19 aa, synthetic construct
  REGION 1..19: note = GFR-binding peptide
  VARIANT 14: note = Xaa is C or S
FYLVSIANLKTPAXTPKTV

SEQ ID NO: 6103 - protein, 17 aa, synthetic construct
  REGION 1..17: note = GFR-binding peptide
  VARIANT 14: note = Xaa is C or S
LYLVSIASLKTPAXTPK

SEQ ID NO: 6104 - protein, 15 aa, synthetic construct
  REGION 1..15: note = GFR-binding peptide
  VARIANT 14..15: note = Xaa is C or S
FYLISIANLDQPVXX

SEQ ID NO: 6105 - protein, 10 aa, synthetic construct
  REGION 1..10: note = GFR-binding peptide
LYLMSIASLE

SEQ ID NO: 6106 - protein, 18 aa, synthetic construct
  REGION 1..18: note = GFR-binding peptide
  VARIANT 14..15: note = Xaa is C or S
FYLISIANMKEPVXXPEP

SEQ ID NO: 6107 - protein, 17 aa, synthetic construct
  REGION 1..17: note = GFR-binding peptide
  VARIANT 14..15: note = Xaa is C or S
FYLMSIANMKTPTXXPG

SEQ ID NO: 6108 - protein, 8 aa, synthetic construct
  REGION 1..8: note = GFR-binding peptide
LYLMSIAS

SEQ ID NO: 6109 - protein, 16 aa, synthetic construct
  REGION 1..16: note = GFR-binding peptide
  VARIANT 14..15: note = Xaa is C or S
FYLISIANLRTPVXXT

SEQ ID NO: 6110 - protein, 20 aa, synthetic construct
  REGION 1..20: note = GFR-binding peptide
  VARIANT 14..15: note = Xaa is C or S
FYLISIANLRTPVXXTPPTS

SEQ ID NO: 6111 - protein, 11 aa, synthetic construct
  REGION 1..11: note = GFR-binding peptide
LYLVSIASLKT

SEQ ID NO: 6112 - protein, 20 aa, synthetic construct
  REGION 1..20: note = GFR-binding peptide
  VARIANT 14..15: note = Xaa is C or S
FYLMSIANLETPVXXAKPIK

SEQ ID NO: 6113 - protein, 19 aa, synthetic construct
  REGION 1..19: note = GFR-binding peptide
  VARIANT 14..15: note = Xaa is C or S
LYLMSIASLETPVXXAKPI

SEQ ID NO: 6114 - protein, 17 aa, synthetic construct
  REGION 1..17: note = GFR-binding peptide
  VARIANT 14..15: note = Xaa is C or S
LYLISIASLRAPVXXSA

SEQ ID NO: 6115 - protein, 13 aa, synthetic construct
  REGION 1..13: note = GFR-binding peptide
FYLISIANLRTPV

SEQ ID NO: 6116 - protein, 15 aa, synthetic construct
  REGION 1..15: note = GFR-binding peptide
  VARIANT 14..15: note = Xaa is C or S
FYLVSIANLQTPAXX

SEQ ID NO: 6117 - protein, 10 aa, synthetic construct
  REGION 1..10: note = GFR-binding peptide
FYLISIANLR

SEQ ID NO: 6118 - protein, 17 aa, synthetic construct
  REGION 1..17: note = GFR-binding peptide
  VARIANT 14..15: note = Xaa is C or S
LYLVSIASLKTPAXXPK

SEQ ID NO: 6119 - protein, 18 aa, synthetic construct
  REGION 1..18: note = GFR-binding peptide
  VARIANT 14..15: note = Xaa is C or S
LYLVSIASLKTPAXXAKP

SEQ ID NO: 6120 - protein, 12 aa, synthetic construct
  REGION 1..12: note = GFR-binding peptide
FYLISIANLDQS

SEQ ID NO: 6121 - protein, 19 aa, synthetic construct
  REGION 1..19: note = GFR-binding peptide
  VARIANT 14..15: note = Xaa is C or S
LYLISIASLAQPVXXPAAS

SEQ ID NO: 6122 - protein, 15 aa, synthetic construct
  REGION 1..15: note = GFR-binding peptide
  VARIANT 14..15: note = Xaa is C or S
FYLMSIANLETPVXX

SEQ ID NO: 6123 - protein, 12 aa, synthetic construct
  REGION 1..12: note = GFR-binding peptide
LYLISIASLRAP

SEQ ID NO: 6124 - protein, 20 aa, synthetic construct
  REGION 1..20: note = GFR-binding peptide
  VARIANT 14..15: note = Xaa is C or S
LYLISIASLDQPVXXPSASA

SEQ ID NO: 6125 - protein, 10 aa, synthetic construct
  REGION 1..10: note = GFR-binding peptide
FYLISIANLA

SEQ ID NO: 6126 - protein, 13 aa, synthetic construct
  REGION 1..13: note = GFR-binding peptide
FYLISIANLKTPV

SEQ ID NO: 6127 - protein, 19 aa, synthetic construct
  REGION 1..19: note = GFR-binding peptide
  VARIANT 14..15: note = Xaa is C or S
LYLISIASLKTPVXXAKSA

SEQ ID NO: 6128 - protein, 14 aa, synthetic construct
  REGION 1..14: note = GFR-binding peptide
  VARIANT 14: note = Xaa is C or S
LYLISIASLRAPVX

SEQ ID NO: 6129 - protein, 18 aa, synthetic construct
  REGION 1..18: note = GFR-binding peptide
  VARIANT 14..15: note = Xaa is C or S
FYLMSIANMKTPTXXPGA

SEQ ID NO: 6130 - protein, 15 aa, synthetic construct
  REGION 1..15: note = GFR-binding peptide
  VARIANT 14..15: note = Xaa is C or S
FYLISIANLKTPVXX

SEQ ID NO: 6131 - protein, 15 aa, synthetic construct
  REGION 1..15: note = GFR-binding peptide
  VARIANT 14..15: note = Xaa is C or S
FYLISIANLAQPVXX

SEQ ID NO: 6132 - protein, 13 aa, synthetic construct
  REGION 1..13: note = GFR-binding peptide
FYLVSIANLQTPA

SEQ ID NO: 6133 - protein, 15 aa, synthetic construct
  REGION 1..15: note = GFR-binding peptide
  VARIANT 14: note = Xaa is C or S
LYLVSIASLKTPAXT

SEQ ID NO: 6134 - protein, 13 aa, synthetic construct
  REGION 1..13: note = GFR-binding peptide
LYLISIASLDQPV

SEQ ID NO: 6135 - protein, 13 aa, synthetic construct
  REGION 1..13: note = GFR-binding peptide
FYLISIANLAQPV

SEQ ID NO: 6136 - protein, 19 aa, synthetic construct
  REGION 1..19: note = GFR-binding peptide
  VARIANT 14..15: note = Xaa is C or S
LYLMSIASMKTPTXXPGAS

SEQ ID NO: 6137 - protein, 12 aa, synthetic construct
  REGION 1..12: note = GFR-binding peptide
LYLVSIASLKTP

SEQ ID NO: 6138 - protein, 15 aa, synthetic construct
  REGION 1..15: note = GFR-binding peptide
  VARIANT 14..15: note = Xaa is C or S
LYLISIASLRTPVXX

SEQ ID NO: 6139 - protein, 14 aa, synthetic construct
  REGION 1..14: note = GFR-binding peptide
  VARIANT 14: note = Xaa is C or S
LYLISIASLDQPVX

SEQ ID NO: 6140 - protein, 12 aa, synthetic construct
  REGION 1..12: note = GFR-binding peptide
FYLVSIANLQTP

SEQ ID NO: 6141 - protein, 13 aa, synthetic construct
  REGION 1..13: note = GFR-binding peptide
FYLMSIANLETPV

SEQ ID NO: 6142 - protein, 19 aa, synthetic construct
  REGION 1..19: note = GFR-binding peptide
  VARIANT 14..15: note = Xaa is C or S
FYLMSIANMKTPTXXPGAS

SEQ ID NO: 6143 - protein, 18 aa, synthetic construct
  REGION 1..18: note = GFR-binding peptide
  VARIANT 14..15: note = Xaa is C or S
LYLVSIASLKTPAXXPKP

SEQ ID NO: 6144 - protein, 16 aa, synthetic construct
  REGION 1..16: note = GFR-binding peptide
  VARIANT 14..15: note = Xaa is C or S
LYLISIASMKEPVXXP

SEQ ID NO: 6145 - protein, 14 aa, synthetic construct
  REGION 1..14: note = GFR-binding peptide
  VARIANT 14: note = Xaa is C or S
FYLISIANLDQSVX

SEQ ID NO: 6146 - protein, 18 aa, synthetic construct
  REGION 1..18: note = GFR-binding peptide
  VARIANT 14..15: note = Xaa is C or S
FYLISIANLKTPVXXAKS

SEQ ID NO: 6147 - protein, 16 aa, synthetic construct
  REGION 1..16: note = GFR-binding peptide
  VARIANT 14..15: note = Xaa is C or S
FYLISIANMKEPVXXP

SEQ ID NO: 6148 - protein, 10 aa, synthetic construct
  REGION 1..10: note = GFR-binding peptide
FYLMSIANMK

SEQ ID NO: 6149 - protein, 10 aa, synthetic construct
  REGION 1..10: note = GFR-binding peptide
LYLMSIASMK

SEQ ID NO: 6150 - protein, 14 aa, synthetic construct
  REGION 1..14: note = GFR-binding peptide
  VARIANT 14: note = Xaa is C or S
FYLISIANLDQPVX

SEQ ID NO: 6151 - protein, 15 aa, synthetic construct
  REGION 1..15: note = GFR-binding peptide
  VARIANT 14..15: note = Xaa is C or S
FYLISIANLRTPVXX

SEQ ID NO: 6152 - protein, 13 aa, synthetic construct
  REGION 1..13: note = GFR-binding peptide
FYLISIANLDQPV

SEQ ID NO: 6153 - protein, 11 aa, synthetic construct
  REGION 1..11: note = GFR-binding peptide
FYLISIANLRT

SEQ ID NO: 6154 - protein, 15 aa, synthetic construct
  REGION 1..15: note = GFR-binding peptide
  VARIANT 14..15: note = Xaa is C or S
LYLISIASLKTPVXX

SEQ ID NO: 6155 - protein, 17 aa, synthetic construct
  REGION 1..17: note = GFR-binding peptide
  VARIANT 14..15: note = Xaa is C or S
FYLVSIANLQTPAXXPK

SEQ ID NO: 6156 - protein, 16 aa, synthetic construct
  REGION 1..16: note = GFR-binding peptide
  VARIANT 14..15: note = Xaa is C or S
FYLISIANLDQSVXXP

SEQ ID NO: 6157 - protein, 19 aa, synthetic construct
  REGION 1..19: note = GFR-binding peptide
  VARIANT 14..15: note = Xaa is C or S
FYLVSIANLKTPVXXAKGV

SEQ ID NO: 6158 - protein, 15 aa, synthetic construct
  REGION 1..15: note = GFR-binding peptide
  VARIANT 14..15: note = Xaa is C or S
LYLVSIASLKTPAXX

SEQ ID NO: 6159 - protein, 11 aa, synthetic construct
  REGION 1..11: note = GFR-binding peptide
LYLISIASMKE

SEQ ID NO: 6160 - protein, 14 aa, synthetic construct
  REGION 1..14: note = GFR-binding peptide
  VARIANT 14: note = Xaa is C or S
FYLISIANLRAPVX

SEQ ID NO: 6161 - protein, 17 aa, synthetic construct
  REGION 1..17: note = GFR-binding peptide
  VARIANT 14..15: note = Xaa is C or S
FYLISIANMKEPVXXPE

SEQ ID NO: 6162 - protein, 12 aa, synthetic construct
  REGION 1..12: note = GFR-binding peptide
FYLISIANMKEP

SEQ ID NO: 6163 - protein, 14 aa, synthetic construct
  REGION 1..14: note = GFR-binding peptide
  VARIANT 14: note = Xaa is C or S
FYLMSIANLETPVX

SEQ ID NO: 6164 - protein, 16 aa, synthetic construct
  REGION 1..16: note = GFR-binding peptide
  VARIANT 14..15: note = Xaa is C or S
FYLVSIANLKTPVXXA

SEQ ID NO: 6165 - protein, 17 aa, synthetic construct
  REGION 1..17: note = GFR-binding peptide
  VARIANT 14..15: note = Xaa is C or S
LYLISIASLDQSVXXPS

SEQ ID NO: 6166 - protein, 9 aa, synthetic construct
  REGION 1..9: note = GFR-binding peptide
LYLISIASL

SEQ ID NO: 6167 - protein, 17 aa, synthetic construct
  REGION 1..17: note = GFR-binding peptide
  VARIANT 14..15: note = Xaa is C or S
LYLMSIASTKVPAXXTS

SEQ ID NO: 6168 - protein, 17 aa, synthetic construct
  REGION 1..17: note = GFR-binding peptide
  VARIANT 14..15: note = Xaa is C or S
FYLVSIANLKTPAXXPK

SEQ ID NO: 6169 - protein, 20 aa, synthetic construct
  REGION 1..20: note = GFR-binding peptide
  VARIANT 14..15: note = Xaa is C or S
FYLISIANLDQPVXXPSASA

SEQ ID NO: 6170 - protein, 10 aa, synthetic construct
  REGION 1..10: note = GFR-binding peptide
FYLISIANLD

SEQ ID NO: 6171 - protein, 8 aa, synthetic construct
  REGION 1..8: note = GFR-binding peptide
FYLVSIAN

SEQ ID NO: 6172 - protein, 18 aa, synthetic construct
  REGION 1..18: note = GFR-binding peptide
  VARIANT 14..15: note = Xaa is C or S
LYLVSIASLQTPAXXPKP

SEQ ID NO: 6173 - protein, 18 aa, synthetic construct
  REGION 1..18: note = GFR-binding peptide
  VARIANT 14..15: note = Xaa is C or S
FYLMSIANTKVPAXXTSP

SEQ ID NO: 6174 - protein, 16 aa, synthetic construct
  REGION 1..16: note = GFR-binding peptide
  VARIANT 14..15: note = Xaa is C or S
FYLVSIANLQTPAXXP

SEQ ID NO: 6175 - protein, 15 aa, synthetic construct
  REGION 1..15: note = GFR-binding peptide
  VARIANT 14..15: note = Xaa is C or S
LYLVSIASLQTPAXX

SEQ ID NO: 6176 - protein, 12 aa, synthetic construct
  REGION 1..12: note = GFR-binding peptide
LYLVSIASLQTP

SEQ ID NO: 6177 - protein, 11 aa, synthetic construct
  REGION 1..11: note = GFR-binding peptide
LYLISIASLKT

SEQ ID NO: 6178 - protein, 20 aa, synthetic construct
  REGION 1..20: note = GFR-binding peptide
  VARIANT 14..15: note = Xaa is C or S
LYLMSIASLETPVXXAKPIK

SEQ ID NO: 6179 - protein, 20 aa, synthetic construct
  REGION 1..20: note = GFR-binding peptide
  VARIANT 14..15: note = Xaa is C or S
FYLISIANLAQPVXXPAASA

SEQ ID NO: 6180 - protein, 19 aa, synthetic construct
  REGION 1..19: note = GFR-binding peptide
  VARIANT 14: note = Xaa is C or S
LYLVSIASLKTPAXTPKTV

SEQ ID NO: 6181 - protein, 20 aa, synthetic construct
  REGION 1..20: note = GFR-binding peptide
  VARIANT 14..15: note = Xaa is C or S
LYLISIASLAQPVXXPAASA

SEQ ID NO: 6182 - protein, 14 aa, synthetic construct
  REGION 1..14: note = GFR-binding peptide
  VARIANT 14: note = Xaa is C or S
FYLVSIANLKTPVX

SEQ ID NO: 6183 - protein, 18 aa, synthetic construct
  REGION 1..18: note = GFR-binding peptide
  VARIANT 14..15: note = Xaa is C or S
FYLISIANLDQSVXXPSA

SEQ ID NO: 6184 - protein, 16 aa, synthetic construct
  REGION 1..16: note = GFR-binding peptide
  VARIANT 14..15: note = Xaa is C or S
LYLISIASLRTPVXXT

SEQ ID NO: 6185 - protein, 16 aa, synthetic construct
  REGION 1..16: note = GFR-binding peptide
  VARIANT 14..15: note = Xaa is C or S
FYLMSIANTKVPAXXT

SEQ ID NO: 6186 - protein, 13 aa, synthetic construct
  REGION 1..13: note = GFR-binding peptide
LYLMSIASTKVPA

SEQ ID NO: 6187 - protein, 12 aa, synthetic construct
  REGION 1..12: note = GFR-binding peptide
LYLISIASLAQP

SEQ ID NO: 6188 - protein, 14 aa, synthetic construct
  REGION 1..14: note = GFR-binding peptide
  VARIANT 14: note = Xaa is C or S
LYLVSIASLKTPVX

SEQ ID NO: 6189 - protein, 16 aa, synthetic construct
  REGION 1..16: note = GFR-binding peptide
  VARIANT 14..15: note = Xaa is C or S
LYLVSIASLKTPVXXA

SEQ ID NO: 6190 - protein, 18 aa, synthetic construct
  REGION 1..18: note = GFR-binding peptide
  VARIANT 14: note = Xaa is C or S
FYLVSIANLKTPAXTPKT

SEQ ID NO: 6191 - protein, 12 aa, synthetic construct
  REGION 1..12: note = GFR-binding peptide
FYLMSIANTKVP

SEQ ID NO: 6192 - protein, 13 aa, synthetic construct
  REGION 1..13: note = GFR-binding peptide
FYLMSIANTKVPA

SEQ ID NO: 6193 - protein, 14 aa, synthetic construct
  REGION 1..14: note = GFR-binding peptide
  VARIANT 14: note = Xaa is C or S
FYLMSIANMKTPTX

SEQ ID NO: 6194 - protein, 12 aa, synthetic construct
  REGION 1..12: note = GFR-binding peptide
FYLISIANLAQP

SEQ ID NO: 6195 - protein, 12 aa, synthetic construct
  REGION 1..12: note = GFR-binding peptide
LYLMSIASTKVP

SEQ ID NO: 6196 - protein, 12 aa, synthetic construct
  REGION 1..12: note = GFR-binding peptide
LYLISIASLDQP

SEQ ID NO: 6197 - protein, 15 aa, synthetic construct
  REGION 1..15: note = GFR-binding peptide
  VARIANT 14..15: note = Xaa is C or S
FYLVSIANLKTPAXX

SEQ ID NO: 6198 - protein, 17 aa, synthetic construct
  REGION 1..17: note = GFR-binding peptide
  VARIANT 14..15: note = Xaa is C or S
FYLISIANLKTPVXXAK

SEQ ID NO: 6199 - protein, 18 aa, synthetic construct
  REGION 1..18: note = GFR-binding peptide
  VARIANT 14..15: note = Xaa is C or S
LYLMSIASTKVPAXXTSP

SEQ ID NO: 6200 - protein, 17 aa, synthetic construct
  REGION 1..17: note = GFR-binding peptide
  VARIANT 14..15: note = Xaa is C or S
FYLISIANLRTPVXXTP

SEQ ID NO: 6201 - protein, 16 aa, synthetic construct
  REGION 1..16: note = GFR-binding peptide
  VARIANT 14..15: note = Xaa is C or S
LYLISIASLDQSVXXP

SEQ ID NO: 6202 - protein, 17 aa, synthetic construct
  REGION 1..17: note = GFR-binding peptide
  VARIANT 14..15: note = Xaa is C or S
LYLISIASMKEPVXXPE

SEQ ID NO: 6203 - protein, 15 aa, synthetic construct
  REGION 1..15: note = GFR-binding peptide
  VARIANT 14..15: note = Xaa is C or S
LYLMSIASTKVPAXX

SEQ ID NO: 6204 - protein, 18 aa, synthetic construct
  REGION 1..18: note = GFR-binding peptide
  VARIANT 14..15: note = Xaa is C or S
LYLISIASLKTPVXXAKS

SEQ ID NO: 6205 - protein, 12 aa, synthetic construct
  REGION 1..12: note = GFR-binding peptide
FYLMSIANMKTP

SEQ ID NO: 6206 - protein, 18 aa, synthetic construct
  REGION 1..18: note = GFR-binding peptide
  VARIANT 14: note = Xaa is C or S
LYLVSIASLKTPAXTPKT

SEQ ID NO: 6207 - protein, 11 aa, synthetic construct
  REGION 1..11: note = GFR-binding peptide
FYLISIANLKT

SEQ ID NO: 6208 - protein, 16 aa, synthetic construct
  REGION 1..16: note = GFR-binding peptide
  VARIANT 14..15: note = Xaa is C or S
LYLMSIASTKVPAXXT

SEQ ID NO: 6209 - protein, 18 aa, synthetic construct
  REGION 1..18: note = GFR-binding peptide
  VARIANT 14..15: note = Xaa is C or S
FYLVSIANLKTPAXXPKP

SEQ ID NO: 6210 - protein, 18 aa, synthetic construct
  REGION 1..18: note = GFR-binding peptide
  VARIANT 14..15: note = Xaa is C or S
LYLISIASLRTPVXXTPP

SEQ ID NO: 6211 - protein, 12 aa, synthetic construct
  REGION 1..12: note = GFR-binding peptide
FYLVSIANLKTP

SEQ ID NO: 6212 - protein, 17 aa, synthetic construct
  REGION 1..17: note = GFR-binding peptide
  VARIANT 14..15: note = Xaa is C or S
FYLISIANLDQSVXXPS

SEQ ID NO: 6213 - protein, 12 aa, synthetic construct
  REGION 1..12: note = GFR-binding peptide
LYLMSIASLETP

SEQ ID NO: 6214 - protein, 18 aa, synthetic construct
  REGION 1..18: note = GFR-binding peptide
  VARIANT 14..15: note = Xaa is C or S
LYLISIASLDQSVXXPSA

SEQ ID NO: 6215 - protein, 17 aa, synthetic construct
  REGION 1..17: note = GFR-binding peptide
  VARIANT 14..15: note = Xaa is C or S
LYLVSIASLQTPAXXPK

SEQ ID NO: 6216 - protein, 17 aa, synthetic construct
  REGION 1..17: note = GFR-binding peptide
  VARIANT 14..15: note = Xaa is C or S
FYLMSIANTKVPAXXTS

SEQ ID NO: 6217 - protein, 9 aa, synthetic construct
  REGION 1..9: note = GFR-binding peptide
FYLISIANL

SEQ ID NO: 6218 - protein, 14 aa, synthetic construct
  REGION 1..14: note = GFR-binding peptide
  VARIANT 14: note = Xaa is C or S
LYLMSIASLETPVX

SEQ ID NO: 6219 - protein, 13 aa, synthetic construct
  REGION 1..13: note = GFR-binding peptide
TQVQLRSVKVAKV

SEQ ID NO: 6220 - protein, 13 aa, synthetic construct
  REGION 1..13: note = GFR-binding peptide
VPTGQRPVQMRKI

SEQ ID NO: 6221 - protein, 11 aa, synthetic construct
  REGION 1..11: note = GFR-binding peptide
TEERPVQMRKI

SEQ ID NO: 6222 - protein, 15 aa, synthetic construct
  REGION 1..15: note = GFR-binding peptide
  VARIANT 1..2: note = Xaa is C or S
XXVSQDLRSVKIAKV

SEQ ID NO: 6223 - protein, 14 aa, synthetic construct
  REGION 1..14: note = GFR-binding peptide
PSRVHHRPVQVRKI

SEQ ID NO: 6224 - protein, 10 aa, synthetic construct
  REGION 1..10: note = GFR-binding peptide
ALRPVQIRKI

SEQ ID NO: 6225 - protein, 19 aa, synthetic construct
  REGION 1..19: note = GFR-binding peptide
  VARIANT 6: note = Xaa is C or S
DEGLEXVPTGQRPVQMRKI

SEQ ID NO: 6226 - protein, 19 aa, synthetic construct
  REGION 1..19: note = GFR-binding peptide
  VARIANT 5..6: note = Xaa is C or S
SAAPXXVPQALRPVQIRKI

SEQ ID NO: 6227 - protein, 14 aa, synthetic construct
  REGION 1..14: note = GFR-binding peptide
  VARIANT 1: note = Xaa is C or S
XVPTEERSVKMAKV

SEQ ID NO: 6228 - protein, 16 aa, synthetic construct
  REGION 1..16: note = GFR-binding peptide
  VARIANT 2..3: note = Xaa is C or S
PXXVPQALRPVQIRKI

SEQ ID NO: 6229 - protein, 12 aa, synthetic construct
  REGION 1..12: note = GFR-binding peptide
SQDLRSVKIAKV

SEQ ID NO: 6230 - protein, 16 aa, synthetic construct
  REGION 1..16: note = GFR-binding peptide
  VARIANT 2..3: note = Xaa is C or S
PXXVPQDLRSVKIAKV

SEQ ID NO: 6231 - protein, 20 aa, synthetic construct
  REGION 1..20: note = GFR-binding peptide
  VARIANT 6..7: note = Xaa is C or S
ASASPXXVPQDLRSVKIAKV

SEQ ID NO: 6232 - protein, 19 aa, synthetic construct
  REGION 1..19: note = GFR-binding peptide
  VARIANT 5..6: note = Xaa is C or S
SASPXXVSQDLRPVQIRKI

SEQ ID NO: 6233 - protein, 15 aa, synthetic construct
  REGION 1..15: note = GFR-binding peptide
  VARIANT 1..2: note = Xaa is C or S
XXVPQDLRSVKIAKV

SEQ ID NO: 6234 - protein, 15 aa, synthetic construct
  REGION 1..15: note = GFR-binding peptide
RPTQVQLRSVKVAKV

SEQ ID NO: 6235 - protein, 9 aa, synthetic construct
  REGION 1..9: note = GFR-binding peptide
QRPVQMRKI

SEQ ID NO: 6236 - protein, 20 aa, synthetic construct
  REGION 1..20: note = GFR-binding peptide
  VARIANT 6..7: note = Xaa is C or S
ASAAPXXVPQALRSVKIAKV

SEQ ID NO: 6237 - protein, 15 aa, synthetic construct
  REGION 1..15: note = GFR-binding peptide
QPSRVHHRPVQVRKI

SEQ ID NO: 6238 - protein, 14 aa, synthetic construct
  REGION 1..14: note = GFR-binding peptide
  VARIANT 1: note = Xaa is C or S
XVPTGQRPVQMRKI

SEQ ID NO: 6239 - protein, 16 aa, synthetic construct
  REGION 1..16: note = GFR-binding peptide
  VARIANT 3: note = Xaa is C or S
LEXVPTGQRSVKMAKV

SEQ ID NO: 6240 - protein, 19 aa, synthetic construct
  REGION 1..19: note = GFR-binding peptide
  VARIANT 4: note = Xaa is C or S
SVKXQPSRVHHRPVQVRKI

SEQ ID NO: 6241 - protein, 15 aa, synthetic construct
  REGION 1..15: note = GFR-binding peptide
  VARIANT 1..2: note = Xaa is C or S
XXVPQALRPVQIRKI

SEQ ID NO: 6242 - protein, 11 aa, synthetic construct
  REGION 1..11: note = GFR-binding peptide
TGQRSVKMAKV

SEQ ID NO: 6243 - protein, 11 aa, synthetic construct
  REGION 1..11: note = GFR-binding peptide
QDLRSVKIAKV

SEQ ID NO: 6244 - protein, 17 aa, synthetic construct
  REGION 1..17: note = GFR-binding peptide
  VARIANT 4: note = Xaa is C or S
GLEXVPTEERPVQMRKI

SEQ ID NO: 6245 - protein, 19 aa, synthetic construct
  REGION 1..19: note = GFR-binding peptide
  VARIANT 6: note = Xaa is C or S
DEGLEXVPTEERSVKMAKV

SEQ ID NO: 6246 - protein, 16 aa, synthetic construct
  REGION 1..16: note = GFR-binding peptide
  VARIANT 2..3: note = Xaa is C or S
PXXVSQDLRSVKIAKV

SEQ ID NO: 6247 - protein, 9 aa, synthetic construct
  REGION 1..9: note = GFR-binding peptide
LRPVQIRKI

SEQ ID NO: 6248 - protein, 18 aa, synthetic construct
  REGION 1..18: note = GFR-binding peptide
  VARIANT 4..5: note = Xaa is C or S
ASPXXVPQDLRPVQIRKI

SEQ ID NO: 6249 - protein, 17 aa, synthetic construct
  REGION 1..17: note = GFR-binding peptide
  VARIANT 3..4: note = Xaa is C or S
SPXXVSQDLRPVQIRKI

SEQ ID NO: 6250 - protein, 13 aa, synthetic construct
  REGION 1..13: note = GFR-binding peptide
VPTEERSVKMAKV

SEQ ID NO: 6251 - protein, 19 aa, synthetic construct
  REGION 1..19: note = GFR-binding peptide
  VARIANT 5..6: note = Xaa is C or S
SASPXXVPQDLRPVQIRKI

SEQ ID NO: 6252 - protein, 20 aa, synthetic construct
  REGION 1..20: note = GFR-binding peptide
  VARIANT 7: note = Xaa is C or S
NDEGLEXVPTEERSVKMAKV

SEQ ID NO: 6253 - protein, 16 aa, synthetic construct
  REGION 1..16: note = GFR-binding peptide
  VARIANT 3: note = Xaa is C or S
LEXVPTEERPVQMRKI

SEQ ID NO: 6254 - protein, 18 aa, synthetic construct
  REGION 1..18: note = GFR-binding peptide
  VARIANT 3: note = Xaa is C or S
VQXRPTQVQLRSVKVAKV

SEQ ID NO: 6255 - protein, 11 aa, synthetic construct
  REGION 1..11: note = GFR-binding peptide
QDLRPVQIRKI

SEQ ID NO: 6256 - protein, 12 aa, synthetic construct
  REGION 1..12: note = GFR-binding peptide
RVHHRPVQVRKI

SEQ ID NO: 6257 - protein, 18 aa, synthetic construct
  REGION 1..18: note = GFR-binding peptide
  VARIANT 4..5: note = Xaa is C or S
AAPXXVPQALRPVQIRKI

SEQ ID NO: 6258 - protein, 10 aa, synthetic construct
  REGION 1..10: note = GFR-binding peptide
HHRPVQVRKI

SEQ ID NO: 6259 - protein, 15 aa, synthetic construct
  REGION 1..15: note = GFR-binding peptide
  VARIANT 2: note = Xaa is C or S
EXVPTGQRSVKMAKV

SEQ ID NO: 6260 - protein, 10 aa, synthetic construct
  REGION 1..10: note = GFR-binding peptide
GQRSVKMAKV

SEQ ID NO: 6261 - protein, 17 aa, synthetic construct
  REGION 1..17: note = GFR-binding peptide
  VARIANT 3..4: note = Xaa is C or S
APXXVPQALRPVQIRKI

SEQ ID NO: 6262 - protein, 17 aa, synthetic construct
  REGION 1..17: note = GFR-binding peptide
  VARIANT 3..4: note = Xaa is C or S
APXXVPQALRSVKIAKV

SEQ ID NO: 6263 - protein, 13 aa, synthetic construct
  REGION 1..13: note = GFR-binding peptide
VPQDLRSVKIAKV

SEQ ID NO: 6264 - protein, 12 aa, synthetic construct
  REGION 1..12: note = GFR-binding peptide
PTEERPVQMRKI

SEQ ID NO: 6265 - protein, 15 aa, synthetic construct
  REGION 1..15: note = GFR-binding peptide
  VARIANT 2: note = Xaa is C or S
EXVPTEERSVKMAKV

SEQ ID NO: 6266 - protein, 10 aa, synthetic construct
  REGION 1..10: note = GFR-binding peptide
DLRSVKIAKV

SEQ ID NO: 6267 - protein, 10 aa, synthetic construct
  REGION 1..10: note = GFR-binding peptide
EERSVKMAKV

SEQ ID NO: 6268 - protein, 13 aa, synthetic construct
  REGION 1..13: note = GFR-binding peptide
VSQDLRSVKIAKV

SEQ ID NO: 6269 - protein, 14 aa, synthetic construct
  REGION 1..14: note = GFR-binding peptide
  VARIANT 1: note = Xaa is C or S
XVPTEERPVQMRKI

SEQ ID NO: 6270 - protein, 19 aa, synthetic construct
  REGION 1..19: note = GFR-binding peptide
  VARIANT 6: note = Xaa is C or S
DEGLEXVPTGQRSVKMAKV

SEQ ID NO: 6271 - protein, 11 aa, synthetic construct
  REGION 1..11: note = GFR-binding peptide
QALRSVKIAKV

SEQ ID NO: 6272 - protein, 20 aa, synthetic construct
  REGION 1..20: note = GFR-binding peptide
  VARIANT 6..7: note = Xaa is C or S
ASASPXXVSQDLRSVKIAKV

SEQ ID NO: 6273 - protein, 12 aa, synthetic construct
  REGION 1..12: note = GFR-binding peptide
QVQLRSVKVAKV

SEQ ID NO: 6274 - protein, 17 aa, synthetic construct
  REGION 1..17: note = GFR-binding peptide
  VARIANT 3..4: note = Xaa is C or S
SPXXVPQDLRSVKIAKV

SEQ ID NO: 6275 - protein, 12 aa, synthetic construct
  REGION 1..12: note = GFR-binding peptide
PQALRPVQIRKI

SEQ ID NO: 6276 - protein, 14 aa, synthetic construct
  REGION 1..14: note = GFR-binding peptide
  VARIANT 1: note = Xaa is C or S
XVPQALRPVQIRKI

SEQ ID NO: 6277 - protein, 9 aa, synthetic construct
  REGION 1..9: note = GFR-binding peptide
QRSVKMAKV

SEQ ID NO: 6278 - protein, 9 aa, synthetic construct
  REGION 1..9: note = GFR-binding peptide
LRSVKVAKV

SEQ ID NO: 6279 - protein, 10 aa, synthetic construct
  REGION 1..10: note = GFR-binding peptide
QLRSVKVAKV

SEQ ID NO: 6280 - protein, 18 aa, synthetic construct
  REGION 1..18: note = GFR-binding peptide
  VARIANT 4..5: note = Xaa is C or S
ASPXXVSQDLRPVQIRKI

SEQ ID NO: 6281 - protein, 19 aa, synthetic construct
  REGION 1..19: note = GFR-binding peptide
  VARIANT 4: note = Xaa is C or S
NVQXRPTQVQLRSVKVAKV

SEQ ID NO: 6282 - protein, 20 aa, synthetic construct
  REGION 1..20: note = GFR-binding peptide
  VARIANT 6..7: note = Xaa is C or S
ASASPXXVSQDLRPVQIRKI

SEQ ID NO: 6283 - protein, 14 aa, synthetic construct
  REGION 1..14: note = GFR-binding peptide
  VARIANT 1: note = Xaa is C or S
XVPTGQRSVKMAKV

SEQ ID NO: 6284 - protein, 16 aa, synthetic construct
  REGION 1..16: note = GFR-binding peptide
  VARIANT 2..3: note = Xaa is C or S
PXXVSQDLRPVQIRKI

SEQ ID NO: 6285 - protein, 19 aa, synthetic construct
  REGION 1..19: note = GFR-binding peptide
  VARIANT 6: note = Xaa is C or S
DEGLEXVPTEERPVQMRKI

SEQ ID NO: 6286 - protein, 12 aa, synthetic construct
  REGION 1..12: note = GFR-binding peptide
PQALRSVKIAKV

SEQ ID NO: 6287 - protein, 11 aa, synthetic construct
  REGION 1..11: note = GFR-binding peptide
TGQRPVQMRKI

SEQ ID NO: 6288 - protein, 16 aa, synthetic construct
  REGION 1..16: note = GFR-binding peptide
  VARIANT 3: note = Xaa is C or S
LEXVPTGQRPVQMRKI

SEQ ID NO: 6289 - protein, 20 aa, synthetic construct
  REGION 1..20: note = GFR-binding peptide
  VARIANT 6..7: note = Xaa is C or S
ASASPXXVPQDLRPVQIRKI

SEQ ID NO: 6290 - protein, 13 aa, synthetic construct
  REGION 1..13: note = GFR-binding peptide
VPTEERPVQMRKI

SEQ ID NO: 6291 - protein, 16 aa, synthetic construct
  REGION 1..16: note = GFR-binding peptide
  VARIANT 2..3: note = Xaa is C or S
PXXVPQALRSVKIAKV

SEQ ID NO: 6292 - protein, 18 aa, synthetic construct
  REGION 1..18: note = GFR-binding peptide
  VARIANT 4..5: note = Xaa is C or S
ASPXXVSQDLRSVKIAKV

SEQ ID NO: 6293 - protein, 18 aa, synthetic construct
  REGION 1..18: note = GFR-binding peptide
  VARIANT 4..5: note = Xaa is C or S
ASPXXVPQDLRSVKIAKV

SEQ ID NO: 6294 - protein, 12 aa, synthetic construct
  REGION 1..12: note = GFR-binding peptide
SQDLRPVQIRKI

SEQ ID NO: 6295 - protein, 12 aa, synthetic construct
  REGION 1..12: note = GFR-binding peptide
PQDLRPVQIRKI

SEQ ID NO: 6296 - protein, 13 aa, synthetic construct
  REGION 1..13: note = GFR-binding peptide
VPTGQRSVKMAKV

SEQ ID NO: 6297 - protein, 17 aa, synthetic construct
  REGION 1..17: note = GFR-binding peptide
  VARIANT 3..4: note = Xaa is C or S
SPXXVSQDLRSVKIAKV

SEQ ID NO: 6298 - protein, 15 aa, synthetic construct
  REGION 1..15: note = GFR-binding peptide
  VARIANT 1..2: note = Xaa is C or S
XXVPQALRSVKIAKV

SEQ ID NO: 6299 - protein, 9 aa, synthetic construct
  REGION 1..9: note = GFR-binding peptide
LRSVKIAKV

SEQ ID NO: 6300 - protein, 20 aa, synthetic construct
  REGION 1..20: note = GFR-binding peptide
  VARIANT 6..7: note = Xaa is C or S
ASAAPXXVPQALRPVQIRKI

SEQ ID NO: 6301 - protein, 18 aa, synthetic construct
  REGION 1..18: note = GFR-binding peptide
  VARIANT 5: note = Xaa is C or S
EGLEXVPTGQRSVKMAKV

SEQ ID NO: 6302 - protein, 16 aa, synthetic construct
  REGION 1..16: note = GFR-binding peptide
  VARIANT 1: note = Xaa is C or S
XRPTQVQLRSVKVAKV

SEQ ID NO: 6303 - protein, 14 aa, synthetic construct
  REGION 1..14: note = GFR-binding peptide
PTQVQLRSVKVAKV

SEQ ID NO: 6304 - protein, 13 aa, synthetic construct
  REGION 1..13: note = GFR-binding peptide
SRVHHRPVQVRKI

SEQ ID NO: 6305 - protein, 10 aa, synthetic construct
  REGION 1..10: note = GFR-binding peptide
ALRSVKIAKV

SEQ ID NO: 6306 - protein, 14 aa, synthetic construct
  REGION 1..14: note = GFR-binding peptide
  VARIANT 1: note = Xaa is C or S
XVPQDLRPVQIRKI

SEQ ID NO: 6307 - protein, 12 aa, synthetic construct
  REGION 1..12: note = GFR-binding peptide
PTGQRPVQMRKI

SEQ ID NO: 6308 - protein, 15 aa, synthetic construct
  REGION 1..15: note = GFR-binding peptide
  VARIANT 1..2: note = Xaa is C or S
XXVSQDLRPVQIRKI

SEQ ID NO: 6309 - protein, 19 aa, synthetic construct
  REGION 1..19: note = GFR-binding peptide
  VARIANT 5..6: note = Xaa is C or S
SAAPXXVPQALRSVKIAKV

SEQ ID NO: 6310 - protein, 19 aa, synthetic construct
  REGION 1..19: note = GFR-binding peptide
  VARIANT 5..6: note = Xaa is C or S
SASPXXVSQDLRSVKIAKV

SEQ ID NO: 6311 - protein, 20 aa, synthetic construct
  REGION 1..20: note = GFR-binding peptide
  VARIANT 7: note = Xaa is C or S
NDEGLEXVPTGQRSVKMAKV

SEQ ID NO: 6312 - protein, 16 aa, synthetic construct
  REGION 1..16: note = GFR-binding peptide
  VARIANT 2..3: note = Xaa is C or S
PXXVPQDLRPVQIRKI

SEQ ID NO: 6313 - protein, 17 aa, synthetic construct
  REGION 1..17: note = GFR-binding peptide
  VARIANT 4: note = Xaa is C or S
GLEXVPTGQRSVKMAKV

SEQ ID NO: 6314 - protein, 11 aa, synthetic construct
  REGION 1..11: note = GFR-binding peptide
TEERSVKMAKV

SEQ ID NO: 6315 - protein, 18 aa, synthetic construct
  REGION 1..18: note = GFR-binding peptide
  VARIANT 5: note = Xaa is C or S
EGLEXVPTEERPVQMRKI

SEQ ID NO: 6316 - protein, 11 aa, synthetic construct
  REGION 1..11: note = GFR-binding peptide
QALRPVQIRKI

SEQ ID NO: 6317 - protein, 13 aa, synthetic construct
  REGION 1..13: note = GFR-binding peptide
VPQALRPVQIRKI

SEQ ID NO: 6318 - protein, 11 aa, synthetic construct
  REGION 1..11: note = GFR-binding peptide
VHHRPVQVRKI

SEQ ID NO: 6319 - protein, 14 aa, synthetic construct
  REGION 1..14: note = GFR-binding peptide
  VARIANT 1: note = Xaa is C or S
XVPQALRSVKIAKV

SEQ ID NO: 6320 - protein, 9 aa, synthetic construct
  REGION 1..9: note = GFR-binding peptide
ERSVKMAKV

SEQ ID NO: 6321 - protein, 14 aa, synthetic construct
  REGION 1..14: note = GFR-binding peptide
  VARIANT 1: note = Xaa is C or S
XVSQDLRSVKIAKV

SEQ ID NO: 6322 - protein, 18 aa, synthetic construct
  REGION 1..18: note = GFR-binding peptide
  VARIANT 3: note = Xaa is C or S
VKXQPSRVHHRPVQVRKI

SEQ ID NO: 6323 - protein, 18 aa, synthetic construct
  REGION 1..18: note = GFR-binding peptide
  VARIANT 5: note = Xaa is C or S
EGLEXVPTGQRPVQMRKI

SEQ ID NO: 6324 - protein, 20 aa, synthetic construct
  REGION 1..20: note = GFR-binding peptide
  VARIANT 7: note = Xaa is C or S
NDEGLEXVPTGQRPVQMRKI

SEQ ID NO: 6325 - protein, 13 aa, synthetic construct
  REGION 1..13: note = GFR-binding peptide
VSQDLRPVQIRKI

SEQ ID NO: 6326 - protein, 17 aa, synthetic construct
  REGION 1..17: note = GFR-binding peptide
  VARIANT 2: note = Xaa is C or S
QXRPTQVQLRSVKVAKV

SEQ ID NO: 6327 - protein, 11 aa, synthetic construct
  REGION 1..11: note = GFR-binding peptide
VQLRSVKVAKV

SEQ ID NO: 6328 - protein, 12 aa, synthetic construct
  REGION 1..12: note = GFR-binding peptide
PTEERSVKMAKV

SEQ ID NO: 6329 - protein, 17 aa, synthetic construct
  REGION 1..17: note = GFR-binding peptide
  VARIANT 2: note = Xaa is C or S
KXQPSRVHHRPVQVRKI

SEQ ID NO: 6330 - protein, 14 aa, synthetic construct
  REGION 1..14: note = GFR-binding peptide
  VARIANT 1: note = Xaa is C or S
XVSQDLRPVQIRKI

SEQ ID NO: 6331 - protein, 15 aa, synthetic construct
  REGION 1..15: note = GFR-binding peptide
  VARIANT 2: note = Xaa is C or S
EXVPTGQRPVQMRKI

SEQ ID NO: 6332 - protein, 10 aa, synthetic construct
  REGION 1..10: note = GFR-binding peptide
GQRPVQMRKI

SEQ ID NO: 6333 - protein, 17 aa, synthetic construct
  REGION 1..17: note = GFR-binding peptide
  VARIANT 3..4: note = Xaa is C or S
SPXXVPQDLRPVQIRKI

SEQ ID NO: 6334 - protein, 20 aa, synthetic construct
  REGION 1..20: note = GFR-binding peptide
  VARIANT 7: note = Xaa is C or S
NDEGLEXVPTEERPVQMRKI

SEQ ID NO: 6335 - protein, 17 aa, synthetic construct
  REGION 1..17: note = GFR-binding peptide
  VARIANT 4: note = Xaa is C or S
GLEXVPTEERSVKMAKV

SEQ ID NO: 6336 - protein, 18 aa, synthetic construct
  REGION 1..18: note = GFR-binding peptide
  VARIANT 4..5: note = Xaa is C or S
AAPXXVPQALRSVKIAKV

SEQ ID NO: 6337 - protein, 17 aa, synthetic construct
  REGION 1..17: note = GFR-binding peptide
  VARIANT 4: note = Xaa is C or S
GLEXVPTGQRPVQMRKI

SEQ ID NO: 6338 - protein, 9 aa, synthetic construct
  REGION 1..9: note = GFR-binding peptide
ERPVQMRKI

SEQ ID NO: 6339 - protein, 13 aa, synthetic construct
  REGION 1..13: note = GFR-binding peptide
VPQALRSVKIAKV

SEQ ID NO: 6340 - protein, 16 aa, synthetic construct
  REGION 1..16: note = GFR-binding peptide
  VARIANT 3: note = Xaa is C or S
LEXVPTEERSVKMAKV

SEQ ID NO: 6341 - protein, 18 aa, synthetic construct
  REGION 1..18: note = GFR-binding peptide
  VARIANT 5: note = Xaa is C or S
EGLEXVPTEERSVKMAKV

SEQ ID NO: 6342 - protein, 16 aa, synthetic construct
  REGION 1..16: note = GFR-binding peptide
  VARIANT 1: note = Xaa is C or S
XQPSRVHHRPVQVRKI

SEQ ID NO: 6343 - protein, 9 aa, synthetic construct
  REGION 1..9: note = GFR-binding peptide
HRPVQVRKI

SEQ ID NO: 6344 - protein, 19 aa, synthetic construct
  REGION 1..19: note = GFR-binding peptide
  VARIANT 5..6: note = Xaa is C or S
SASPXXVPQDLRSVKIAKV

SEQ ID NO: 6345 - protein, 15 aa, synthetic construct
  REGION 1..15: note = GFR-binding peptide
  VARIANT 2: note = Xaa is C or S
EXVPTEERPVQMRKI

SEQ ID NO: 6346 - protein, 10 aa, synthetic construct
  REGION 1..10: note = GFR-binding peptide
DLRPVQIRKI

SEQ ID NO: 6347 - protein, 10 aa, synthetic construct
  REGION 1..10: note = GFR-binding peptide
EERPVQMRKI

SEQ ID NO: 6348 - protein, 12 aa, synthetic construct
  REGION 1..12: note = GFR-binding peptide
PTGQRSVKMAKV

SEQ ID NO: 6349 - protein, 13 aa, synthetic construct
  REGION 1..13: note = GFR-binding peptide
VPQDLRPVQIRKI

SEQ ID NO: 6350 - protein, 12 aa, synthetic construct
  REGION 1..12: note = GFR-binding peptide
PQDLRSVKIAKV

SEQ ID NO: 6351 - protein, 14 aa, synthetic construct
  REGION 1..14: note = GFR-binding peptide
  VARIANT 1: note = Xaa is C or S
XVPQDLRSVKIAKV

SEQ ID NO: 6352 - protein, 15 aa, synthetic construct
  REGION 1..15: note = GFR-binding peptide
  VARIANT 1..2: note = Xaa is C or S
XXVPQDLRPVQIRKI

SEQ ID NO: 6353 - protein, 4 aa, synthetic construct
  REGION 1..4: note = Building block peptide "PEP"
EPIS

SEQ ID NO: 6354 - protein, 4 aa, synthetic construct
  REGION 1..4: note = Building block peptide "PEP"
EPLP

SEQ ID NO: 6355 - protein, 4 aa, synthetic construct
  REGION 1..4: note = Building block peptide "PEP"
EPLT

SEQ ID NO: 6356 - protein, 4 aa, synthetic construct
  REGION 1..4: note = Building block peptide "PEP"
KPLS

SEQ ID NO: 6357 - protein, 4 aa, synthetic construct
  REGION 1..4: note = Building block peptide "PEP"
NAIS

SEQ ID NO: 6358 - protein, 4 aa, synthetic construct
  REGION 1..4: note = Building block peptide "PEP"
RPVQ

SEQ ID NO: 6359 - protein, 4 aa, synthetic construct
  REGION 1..4: note = Building block peptide "PEP"
RSVK

SEQ ID NO: 6360 - protein, 4 aa, synthetic construct
  REGION 1..4: note = Building block peptide "PEP"
SAIS

SEQ ID NO: 6361 - protein, 4 aa, synthetic construct
  REGION 1..4: note = Building block peptide "PEP"
SATS

SEQ ID NO: 6362 - protein, 4 aa, synthetic construct
  REGION 1..4: note = Building block peptide "PEP"
SNIT

SEQ ID NO: 6363 - protein, 4 aa, synthetic construct
  REGION 1..4: note = Building block peptide "PEP"
SPIN

SEQ ID NO: 6364 - protein, 4 aa, synthetic construct
  REGION 1..4: note = Building block peptide "PEP"
SPIS

SEQ ID NO: 6365 - protein, 4 aa, synthetic construct
  REGION 1..4: note = Building block peptide "PEP"
SSLS

SEQ ID NO: 6366 - protein, 5 aa, synthetic construct
  REGION 1..5: note = Building block peptide "PEP"
APTAL

SEQ ID NO: 6367 - protein, 5 aa, synthetic construct
  REGION 1..5: note = Building block peptide "PEP"
APTDL

SEQ ID NO: 6368 - protein, 5 aa, synthetic construct
  REGION 1..5: note = Building block peptide "PEP"
APTEL

SEQ ID NO: 6369 - protein, 5 aa, synthetic construct
  REGION 1..5: note = Building block peptide "PEP"
APTKL

SEQ ID NO: 6370 - protein, 5 aa, synthetic construct
  REGION 1..5: note = Building block peptide "PEP"
APTKM

SEQ ID NO: 6371 - protein, 5 aa, synthetic construct
  REGION 1..5: note = Building block peptide "PEP"
APTKT

SEQ ID NO: 6372 - protein, 5 aa, synthetic construct
  REGION 1..5: note = Building block peptide "PEP"
APTQL

SEQ ID NO: 6373 - protein, 5 aa, synthetic construct
  REGION 1..5: note = Building block peptide "PEP"
APTRL

SEQ ID NO: 6374 - protein, 5 aa, synthetic construct
  REGION 1..5: note = Building block peptide "PEP"
APVAL

SEQ ID NO: 6375 - protein, 5 aa, synthetic construct
  REGION 1..5: note = Building block peptide "PEP"
APVDL

SEQ ID NO: 6376 - protein, 5 aa, synthetic construct
  REGION 1..5: note = Building block peptide "PEP"
APVEL

SEQ ID NO: 6377 - protein, 5 aa, synthetic construct
  REGION 1..5: note = Building block peptide "PEP"
APVKL

SEQ ID NO: 6378 - protein, 5 aa, synthetic construct
  REGION 1..5: note = Building block peptide "PEP"
APVKM

SEQ ID NO: 6379 - protein, 5 aa, synthetic construct
  REGION 1..5: note = Building block peptide "PEP"
APVKT

SEQ ID NO: 6380 - protein, 5 aa, synthetic construct
  REGION 1..5: note = Building block peptide "PEP"
APVQL

SEQ ID NO: 6381 - protein, 5 aa, synthetic construct
  REGION 1..5: note = Building block peptide "PEP"
APVRL

SEQ ID NO: 6382 - protein, 5 aa, synthetic construct
  REGION 1..5: note = Building block peptide "PEP"
SRVHH

SEQ ID NO: 6383 - protein, 5 aa, synthetic construct
  REGION 1..5: note = Building block peptide "PEP"
SRVQL

SEQ ID NO: 6384 - protein, 5 aa, synthetic construct
  REGION 1..5: note = Building block peptide "PEP"
TPTAL

SEQ ID NO: 6385 - protein, 5 aa, synthetic construct
  REGION 1..5: note = Building block peptide "PEP"
TPTDL

SEQ ID NO: 6386 - protein, 5 aa, synthetic construct
  REGION 1..5: note = Building block peptide "PEP"
TPTEL

SEQ ID NO: 6387 - protein, 5 aa, synthetic construct
  REGION 1..5: note = Building block peptide "PEP"
TPTKL

SEQ ID NO: 6388 - protein, 5 aa, synthetic construct
  REGION 1..5: note = Building block peptide "PEP"
TPTKM

SEQ ID NO: 6389 - protein, 5 aa, synthetic construct
  REGION 1..5: note = Building block peptide "PEP"
TPTKT

SEQ ID NO: 6390 - protein, 5 aa, synthetic construct
  REGION 1..5: note = Building block peptide "PEP"
TPTQL

SEQ ID NO: 6391 - protein, 5 aa, synthetic construct
  REGION 1..5: note = Building block peptide "PEP"
TPTRL

SEQ ID NO: 6392 - protein, 5 aa, synthetic construct
  REGION 1..5: note = Building block peptide "PEP"
TQVHH

SEQ ID NO: 6393 - protein, 5 aa, synthetic construct
  REGION 1..5: note = Building block peptide "PEP"
TQVQL

SEQ ID NO: 6394 - protein, 5 aa, synthetic construct
  REGION 1..5: note = Building block peptide "PEP"
VPAAL

SEQ ID NO: 6395 - protein, 5 aa, synthetic construct
  REGION 1..5: note = Building block peptide "PEP"
VPADL

SEQ ID NO: 6396 - protein, 5 aa, synthetic construct
  REGION 1..5: note = Building block peptide "PEP"
VPAEL

SEQ ID NO: 6397 - protein, 5 aa, synthetic construct
  REGION 1..5: note = Building block peptide "PEP"
VPAKL

SEQ ID NO: 6398 - protein, 5 aa, synthetic construct
  REGION 1..5: note = Building block peptide "PEP"
VPAKM

SEQ ID NO: 6399 - protein, 5 aa, synthetic construct
  REGION 1..5: note = Building block peptide "PEP"
VPAKT

SEQ ID NO: 6400 - protein, 5 aa, synthetic construct
  REGION 1..5: note = Building block peptide "PEP"
VPAQL

SEQ ID NO: 6401 - protein, 5 aa, synthetic construct
  REGION 1..5: note = Building block peptide "PEP"
VPARL

SEQ ID NO: 6402 - protein, 5 aa, synthetic construct
  REGION 1..5: note = Building block peptide "PEP"
VPEAL

SEQ ID NO: 6403 - protein, 5 aa, synthetic construct
  REGION 1..5: note = Building block peptide "PEP"
VPEDL

SEQ ID NO: 6404 - protein, 5 aa, synthetic construct
  REGION 1..5: note = Building block peptide "PEP"
VPEEL

SEQ ID NO: 6405 - protein, 5 aa, synthetic construct
  REGION 1..5: note = Building block peptide "PEP"
VPEKL

SEQ ID NO: 6406 - protein, 5 aa, synthetic construct
  REGION 1..5: note = Building block peptide "PEP"
VPEKM

SEQ ID NO: 6407 - protein, 5 aa, synthetic construct
  REGION 1..5: note = Building block peptide "PEP"
VPEKT

SEQ ID NO: 6408 - protein, 5 aa, synthetic construct
  REGION 1..5: note = Building block peptide "PEP"
VPEQL

SEQ ID NO: 6409 - protein, 5 aa, synthetic construct
  REGION 1..5: note = Building block peptide "PEP"
VPERL

SEQ ID NO: 6410 - protein, 5 aa, synthetic construct
  REGION 1..5: note = Building block peptide "PEP"
VPQAL

SEQ ID NO: 6411 - protein, 5 aa, synthetic construct
  REGION 1..5: note = Building block peptide "PEP"
VPQDL

SEQ ID NO: 6412 - protein, 5 aa, synthetic construct
  REGION 1..5: note = Building block peptide "PEP"
VPQEL

SEQ ID NO: 6413 - protein, 5 aa, synthetic construct
  REGION 1..5: note = Building block peptide "PEP"
VPQKL

SEQ ID NO: 6414 - protein, 5 aa, synthetic construct
  REGION 1..5: note = Building block peptide "PEP"
VPQKM

SEQ ID NO: 6415 - protein, 5 aa, synthetic construct
  REGION 1..5: note = Building block peptide "PEP"
VPQKT

SEQ ID NO: 6416 - protein, 5 aa, synthetic construct
  REGION 1..5: note = Building block peptide "PEP"
VPQQL

SEQ ID NO: 6417 - protein, 5 aa, synthetic construct
  REGION 1..5: note = Building block peptide "PEP"
VPQRL

SEQ ID NO: 6418 - protein, 5 aa, synthetic construct
  REGION 1..5: note = Building block peptide "PEP"
VPTAL

SEQ ID NO: 6419 - protein, 5 aa, synthetic construct
  REGION 1..5: note = Building block peptide "PEP"
VPTDL

SEQ ID NO: 6420 - protein, 5 aa, synthetic construct
  REGION 1..5: note = Building block peptide "PEP"
VPTEE

SEQ ID NO: 6421 - protein, 5 aa, synthetic construct
  REGION 1..5: note = Building block peptide "PEP"
VPTEL

SEQ ID NO: 6422 - protein, 5 aa, synthetic construct
  REGION 1..5: note = Building block peptide "PEP"
VPTGQ

SEQ ID NO: 6423 - protein, 5 aa, synthetic construct
  REGION 1..5: note = Building block peptide "PEP"
VPTKL

SEQ ID NO: 6424 - protein, 5 aa, synthetic construct
  REGION 1..5: note = Building block peptide "PEP"
VPTKM

SEQ ID NO: 6425 - protein, 5 aa, synthetic construct
  REGION 1..5: note = Building block peptide "PEP"
VPTKT

SEQ ID NO: 6426 - protein, 5 aa, synthetic construct
  REGION 1..5: note = Building block peptide "PEP"
VPTQL

SEQ ID NO: 6427 - protein, 5 aa, synthetic construct
  REGION 1..5: note = Building block peptide "PEP"
VPTRL

SEQ ID NO: 6428 - protein, 5 aa, synthetic construct
  REGION 1..5: note = Building block peptide "PEP"
VSQAL

SEQ ID NO: 6429 - protein, 5 aa, synthetic construct
  REGION 1..5: note = Building block peptide "PEP"
VSQDL

SEQ ID NO: 6430 - protein, 5 aa, synthetic construct
  REGION 1..5: note = Building block peptide "PEP"
VSQEL

SEQ ID NO: 6431 - protein, 5 aa, synthetic construct
  REGION 1..5: note = Building block peptide "PEP"
VSQKL

SEQ ID NO: 6432 - protein, 5 aa, synthetic construct
  REGION 1..5: note = Building block peptide "PEP"
VSQKM

SEQ ID NO: 6433 - protein, 5 aa, synthetic construct
  REGION 1..5: note = Building block peptide "PEP"
VSQKT

SEQ ID NO: 6434 - protein, 5 aa, synthetic construct
  REGION 1..5: note = Building block peptide "PEP"
VSQQL

SEQ ID NO: 6435 - protein, 5 aa, synthetic construct
  REGION 1..5: note = Building block peptide "PEP"
VSQRL

SEQ ID NO: 6436 - protein, 7 aa, synthetic construct
  REGION 1..7: note = Building block peptide "PEP"
  VARIANT 6..7: note = Xaa is C or S
AAPASXX

SEQ ID NO: 6437 - protein, 7 aa, synthetic construct
  REGION 1..7: note = Building block peptide "PEP"
  VARIANT 6..7: note = Xaa is C or S
ASAAPXX

SEQ ID NO: 6438 - protein, 7 aa, synthetic construct
  REGION 1..7: note = Building block peptide "PEP"
  VARIANT 6..7: note = Xaa is C or S
ASASPXX

SEQ ID NO: 6439 - protein, 7 aa, synthetic construct
  REGION 1..7: note = Building block peptide "PEP"
  VARIANT 6..7: note = Xaa is C or S
AVPKAXX

SEQ ID NO: 6440 - protein, 7 aa, synthetic construct
  REGION 1..7: note = Building block peptide "PEP"
  VARIANT 6..7: note = Xaa is C or S
GIPEPXX

SEQ ID NO: 6441 - protein, 7 aa, synthetic construct
  REGION 1..7: note = Building block peptide "PEP"
  VARIANT 6..7: note = Xaa is C or S
GSAGPXX

SEQ ID NO: 6442 - protein, 7 aa, synthetic construct
  REGION 1..7: note = Building block peptide "PEP"
  VARIANT 6..7: note = Xaa is C or S
HVPKPXX

SEQ ID NO: 6443 - protein, 7 aa, synthetic construct
  REGION 1..7: note = Building block peptide "PEP"
  VARIANT 7: note = Xaa is C or S
HVTKPTX

SEQ ID NO: 6444 - protein, 7 aa, synthetic construct
  REGION 1..7: note = Building block peptide "PEP"
  VARIANT 6..7: note = Xaa is C or S
KASKAXX

SEQ ID NO: 6445 - protein, 7 aa, synthetic construct
  REGION 1..7: note = Building block peptide "PEP"
  VARIANT 6..7: note = Xaa is C or S
KIPKAXX

SEQ ID NO: 6446 - protein, 7 aa, synthetic construct
  REGION 1..7: note = Building block peptide "PEP"
  VARIANT 6..7: note = Xaa is C or S
KVGKAXX

SEQ ID NO: 6447 - protein, 7 aa, synthetic construct
  REGION 1..7: note = Building block peptide "PEP"
  VARIANT 7: note = Xaa is C or S
NDEGLEX

SEQ ID NO: 6448 - protein, 7 aa, synthetic construct
  REGION 1..7: note = Building block peptide "PEP"
  VARIANT 5: note = Xaa is C or S
RNVQXRP

SEQ ID NO: 6449 - protein, 7 aa, synthetic construct
  REGION 1..7: note = Building block peptide "PEP"
  VARIANT 6..7: note = Xaa is C or S
RVPSTXX

SEQ ID NO: 6450 - protein, 7 aa, synthetic construct
  REGION 1..7: note = Building block peptide "PEP"
  VARIANT 6..7: note = Xaa is C or S
SIPKAXX

SEQ ID NO: 6451 - protein, 7 aa, synthetic construct
  REGION 1..7: note = Building block peptide "PEP"
  VARIANT 5: note = Xaa is C or S
SSVKXQP

SEQ ID NO: 6452 - protein, 7 aa, synthetic construct
  REGION 1..7: note = Building block peptide "PEP"
  VARIANT 6..7: note = Xaa is C or S
STPPTXX

SEQ ID NO: 6453 - protein, 7 aa, synthetic construct
  REGION 1..7: note = Building block peptide "PEP"
  VARIANT 6..7: note = Xaa is C or S
TVPKPXX

SEQ ID NO: 6454 - protein, 7 aa, synthetic construct
  REGION 1..7: note = Building block peptide "PEP"
  VARIANT 6..7: note = Xaa is C or S
YVPKPXX

SEQ ID NO: 6455 - protein, 12 aa, synthetic construct
  REGION 1..12: note = Building block peptide "PEP"
  VARIANT 6..7: note = Xaa is C or S
AAPASXXAPTRL

SEQ ID NO: 6456 - protein, 12 aa, synthetic construct
  REGION 1..12: note = Building block peptide "PEP"
  VARIANT 6..7: note = Xaa is C or S
AAPASXXAPVRL

SEQ ID NO: 6457 - protein, 12 aa, synthetic construct
  REGION 1..12: note = Building block peptide "PEP"
  VARIANT 6..7: note = Xaa is C or S
AAPASXXTPTRL

SEQ ID NO: 6458 - protein, 12 aa, synthetic construct
  REGION 1..12: note = Building block peptide "PEP"
  VARIANT 6..7: note = Xaa is C or S
AAPASXXVPARL

SEQ ID NO: 6459 - protein, 12 aa, synthetic construct
  REGION 1..12: note = Building block peptide "PEP"
  VARIANT 6..7: note = Xaa is C or S
AAPASXXVPERL

SEQ ID NO: 6460 - protein, 12 aa, synthetic construct
  REGION 1..12: note = Building block peptide "PEP"
  VARIANT 6..7: note = Xaa is C or S
AAPASXXVPQRL

SEQ ID NO: 6461 - protein, 12 aa, synthetic construct
  REGION 1..12: note = Building block peptide "PEP"
  VARIANT 6..7: note = Xaa is C or S
AAPASXXVPTRL

SEQ ID NO: 6462 - protein, 12 aa, synthetic construct
  REGION 1..12: note = Building block peptide "PEP"
  VARIANT 6..7: note = Xaa is C or S
AAPASXXVSQRL

SEQ ID NO: 6463 - protein, 12 aa, synthetic construct
  REGION 1..12: note = Building block peptide "PEP"
  VARIANT 6..7: note = Xaa is C or S
ASAAPXXAPTAL

SEQ ID NO: 6464 - protein, 12 aa, synthetic construct
  REGION 1..12: note = Building block peptide "PEP"
  VARIANT 6..7: note = Xaa is C or S
ASAAPXXAPVAL

SEQ ID NO: 6465 - protein, 12 aa, synthetic construct
  REGION 1..12: note = Building block peptide "PEP"
  VARIANT 6..7: note = Xaa is C or S
ASAAPXXTPTAL

SEQ ID NO: 6466 - protein, 12 aa, synthetic construct
  REGION 1..12: note = Building block peptide "PEP"
  VARIANT 6..7: note = Xaa is C or S
ASAAPXXVPAAL

SEQ ID NO: 6467 - protein, 12 aa, synthetic construct
  REGION 1..12: note = Building block peptide "PEP"
  VARIANT 6..7: note = Xaa is C or S
ASAAPXXVPEAL

SEQ ID NO: 6468 - protein, 12 aa, synthetic construct
  REGION 1..12: note = Building block peptide "PEP"
  VARIANT 6..7: note = Xaa is C or S
ASAAPXXVPQAL

SEQ ID NO: 6469 - protein, 12 aa, synthetic construct
  REGION 1..12: note = Building block peptide "PEP"
  VARIANT 6..7: note = Xaa is C or S
ASAAPXXVPTAL

SEQ ID NO: 6470 - protein, 12 aa, synthetic construct
  REGION 1..12: note = Building block peptide "PEP"
  VARIANT 6..7: note = Xaa is C or S
ASAAPXXVSQAL

SEQ ID NO: 6471 - protein, 12 aa, synthetic construct
  REGION 1..12: note = Building block peptide "PEP"
  VARIANT 6..7: note = Xaa is C or S
ASASPXXAPTDL

SEQ ID NO: 6472 - protein, 12 aa, synthetic construct
  REGION 1..12: note = Building block peptide "PEP"
  VARIANT 6..7: note = Xaa is C or S
ASASPXXAPVDL

SEQ ID NO: 6473 - protein, 12 aa, synthetic construct
  REGION 1..12: note = Building block peptide "PEP"
  VARIANT 6..7: note = Xaa is C or S
ASASPXXTPTDL

SEQ ID NO: 6474 - protein, 12 aa, synthetic construct
  REGION 1..12: note = Building block peptide "PEP"
  VARIANT 6..7: note = Xaa is C or S
ASASPXXVPADL

SEQ ID NO: 6475 - protein, 12 aa, synthetic construct
  REGION 1..12: note = Building block peptide "PEP"
  VARIANT 6..7: note = Xaa is C or S
ASASPXXVPEDL

SEQ ID NO: 6476 - protein, 12 aa, synthetic construct
  REGION 1..12: note = Building block peptide "PEP"
  VARIANT 6..7: note = Xaa is C or S
ASASPXXVPQDL

SEQ ID NO: 6477 - protein, 12 aa, synthetic construct
  REGION 1..12: note = Building block peptide "PEP"
  VARIANT 6..7: note = Xaa is C or S
ASASPXXVPTDL

SEQ ID NO: 6478 - protein, 12 aa, synthetic construct
  REGION 1..12: note = Building block peptide "PEP"
  VARIANT 6..7: note = Xaa is C or S
ASASPXXVSQDL

SEQ ID NO: 6479 - protein, 12 aa, synthetic construct
  REGION 1..12: note = Building block peptide "PEP"
  VARIANT 6..7: note = Xaa is C or S
AVPKAXXAPTKL

SEQ ID NO: 6480 - protein, 12 aa, synthetic construct
  REGION 1..12: note = Building block peptide "PEP"
  VARIANT 6..7: note = Xaa is C or S
AVPKAXXAPVKL

SEQ ID NO: 6481 - protein, 12 aa, synthetic construct
  REGION 1..12: note = Building block peptide "PEP"
  VARIANT 6..7: note = Xaa is C or S
AVPKAXXTPTKL

SEQ ID NO: 6482 - protein, 12 aa, synthetic construct
  REGION 1..12: note = Building block peptide "PEP"
  VARIANT 6..7: note = Xaa is C or S
AVPKAXXVPAKL

SEQ ID NO: 6483 - protein, 12 aa, synthetic construct
  REGION 1..12: note = Building block peptide "PEP"
  VARIANT 6..7: note = Xaa is C or S
AVPKAXXVPEKL

SEQ ID NO: 6484 - protein, 12 aa, synthetic construct
  REGION 1..12: note = Building block peptide "PEP"
  VARIANT 6..7: note = Xaa is C or S
AVPKAXXVPQKL

SEQ ID NO: 6485 - protein, 12 aa, synthetic construct
  REGION 1..12: note = Building block peptide "PEP"
  VARIANT 6..7: note = Xaa is C or S
AVPKAXXVPTKL

SEQ ID NO: 6486 - protein, 12 aa, synthetic construct
  REGION 1..12: note = Building block peptide "PEP"
  VARIANT 6..7: note = Xaa is C or S
AVPKAXXVSQKL

SEQ ID NO: 6487 - protein, 12 aa, synthetic construct
  REGION 1..12: note = Building block peptide "PEP"
  VARIANT 6..7: note = Xaa is C or S
GIPEPXXAPTKM

SEQ ID NO: 6488 - protein, 12 aa, synthetic construct
  REGION 1..12: note = Building block peptide "PEP"
  VARIANT 6..7: note = Xaa is C or S
GIPEPXXAPVKM

SEQ ID NO: 6489 - protein, 12 aa, synthetic construct
  REGION 1..12: note = Building block peptide "PEP"
  VARIANT 6..7: note = Xaa is C or S
GIPEPXXTPTKM

SEQ ID NO: 6490 - protein, 12 aa, synthetic construct
  REGION 1..12: note = Building block peptide "PEP"
  VARIANT 6..7: note = Xaa is C or S
GIPEPXXVPAKM

SEQ ID NO: 6491 - protein, 12 aa, synthetic construct
  REGION 1..12: note = Building block peptide "PEP"
  VARIANT 6..7: note = Xaa is C or S
GIPEPXXVPEKM

SEQ ID NO: 6492 - protein, 12 aa, synthetic construct
  REGION 1..12: note = Building block peptide "PEP"
  VARIANT 6..7: note = Xaa is C or S
GIPEPXXVPQKM

SEQ ID NO: 6493 - protein, 12 aa, synthetic construct
  REGION 1..12: note = Building block peptide "PEP"
  VARIANT 6..7: note = Xaa is C or S
GIPEPXXVPTKM

SEQ ID NO: 6494 - protein, 12 aa, synthetic construct
  REGION 1..12: note = Building block peptide "PEP"
  VARIANT 6..7: note = Xaa is C or S
GIPEPXXVSQKM

SEQ ID NO: 6495 - protein, 12 aa, synthetic construct
  REGION 1..12: note = Building block peptide "PEP"
  VARIANT 6..7: note = Xaa is C or S
GSAGPXXAPTKM

SEQ ID NO: 6496 - protein, 12 aa, synthetic construct
  REGION 1..12: note = Building block peptide "PEP"
  VARIANT 6..7: note = Xaa is C or S
GSAGPXXAPVKM

SEQ ID NO: 6497 - protein, 12 aa, synthetic construct
  REGION 1..12: note = Building block peptide "PEP"
  VARIANT 6..7: note = Xaa is C or S
GSAGPXXTPTKM

SEQ ID NO: 6498 - protein, 12 aa, synthetic construct
  REGION 1..12: note = Building block peptide "PEP"
  VARIANT 6..7: note = Xaa is C or S
GSAGPXXVPAKM

SEQ ID NO: 6499 - protein, 12 aa, synthetic construct
  REGION 1..12: note = Building block peptide "PEP"
  VARIANT 6..7: note = Xaa is C or S
GSAGPXXVPEKM

SEQ ID NO: 6500 - protein, 12 aa, synthetic construct
  REGION 1..12: note = Building block peptide "PEP"
  VARIANT 6..7: note = Xaa is C or S
GSAGPXXVPQKM

SEQ ID NO: 6501 - protein, 12 aa, synthetic construct
  REGION 1..12: note = Building block peptide "PEP"
  VARIANT 6..7: note = Xaa is C or S
GSAGPXXVPTKM

SEQ ID NO: 6502 - protein, 12 aa, synthetic construct
  REGION 1..12: note = Building block peptide "PEP"
  VARIANT 6..7: note = Xaa is C or S
GSAGPXXVSQKM

SEQ ID NO: 6503 - protein, 12 aa, synthetic construct
  REGION 1..12: note = Building block peptide "PEP"
  VARIANT 6..7: note = Xaa is C or S
HVPKPXXAPTKL

SEQ ID NO: 6504 - protein, 12 aa, synthetic construct
  REGION 1..12: note = Building block peptide "PEP"
  VARIANT 6..7: note = Xaa is C or S
HVPKPXXAPVKL

SEQ ID NO: 6505 - protein, 12 aa, synthetic construct
  REGION 1..12: note = Building block peptide "PEP"
  VARIANT 6..7: note = Xaa is C or S
HVPKPXXTPTKL

SEQ ID NO: 6506 - protein, 12 aa, synthetic construct
  REGION 1..12: note = Building block peptide "PEP"
  VARIANT 6..7: note = Xaa is C or S
HVPKPXXVPAKL

SEQ ID NO: 6507 - protein, 12 aa, synthetic construct
  REGION 1..12: note = Building block peptide "PEP"
  VARIANT 6..7: note = Xaa is C or S
HVPKPXXVPEKL

SEQ ID NO: 6508 - protein, 12 aa, synthetic construct
  REGION 1..12: note = Building block peptide "PEP"
  VARIANT 6..7: note = Xaa is C or S
HVPKPXXVPQKL

SEQ ID NO: 6509 - protein, 12 aa, synthetic construct
  REGION 1..12: note = Building block peptide "PEP"
  VARIANT 6..7: note = Xaa is C or S
HVPKPXXVPTKL

SEQ ID NO: 6510 - protein, 12 aa, synthetic construct
  REGION 1..12: note = Building block peptide "PEP"
  VARIANT 6..7: note = Xaa is C or S
HVPKPXXVSQKL

SEQ ID NO: 6511 - protein, 12 aa, synthetic construct
  REGION 1..12: note = Building block peptide "PEP"
  VARIANT 7: note = Xaa is C or S
HVTKPTXAPTKL

SEQ ID NO: 6512 - protein, 12 aa, synthetic construct
  REGION 1..12: note = Building block peptide "PEP"
  VARIANT 7: note = Xaa is C or S
HVTKPTXAPVKL

SEQ ID NO: 6513 - protein, 12 aa, synthetic construct
  REGION 1..12: note = Building block peptide "PEP"
  VARIANT 7: note = Xaa is C or S
HVTKPTXSRVKL

SEQ ID NO: 6514 - protein, 12 aa, synthetic construct
  REGION 1..12: note = Building block peptide "PEP"
  VARIANT 7: note = Xaa is C or S
HVTKPTXTPTKL

SEQ ID NO: 6515 - protein, 12 aa, synthetic construct
  REGION 1..12: note = Building block peptide "PEP"
  VARIANT 7: note = Xaa is C or S
HVTKPTXTQVKL

SEQ ID NO: 6516 - protein, 12 aa, synthetic construct
  REGION 1..12: note = Building block peptide "PEP"
  VARIANT 7: note = Xaa is C or S
HVTKPTXVPAKL

SEQ ID NO: 6517 - protein, 12 aa, synthetic construct
  REGION 1..12: note = Building block peptide "PEP"
  VARIANT 7: note = Xaa is C or S
HVTKPTXVPEKL

SEQ ID NO: 6518 - protein, 12 aa, synthetic construct
  REGION 1..12: note = Building block peptide "PEP"
  VARIANT 7: note = Xaa is C or S
HVTKPTXVPQKL

SEQ ID NO: 6519 - protein, 12 aa, synthetic construct
  REGION 1..12: note = Building block peptide "PEP"
  VARIANT 7: note = Xaa is C or S
HVTKPTXVPTKL

SEQ ID NO: 6520 - protein, 12 aa, synthetic construct
  REGION 1..12: note = Building block peptide "PEP"
  VARIANT 7: note = Xaa is C or S
HVTKPTXVSQKL

SEQ ID NO: 6521 - protein, 12 aa, synthetic construct
  REGION 1..12: note = Building block peptide "PEP"
  VARIANT 6..7: note = Xaa is C or S
KASKAXXAPTKL

SEQ ID NO: 6522 - protein, 12 aa, synthetic construct
  REGION 1..12: note = Building block peptide "PEP"
  VARIANT 6..7: note = Xaa is C or S
KASKAXXAPVKL

SEQ ID NO: 6523 - protein, 12 aa, synthetic construct
  REGION 1..12: note = Building block peptide "PEP"
  VARIANT 6..7: note = Xaa is C or S
KASKAXXTPTKL

SEQ ID NO: 6524 - protein, 12 aa, synthetic construct
  REGION 1..12: note = Building block peptide "PEP"
  VARIANT 6..7: note = Xaa is C or S
KASKAXXVPAKL

SEQ ID NO: 6525 - protein, 12 aa, synthetic construct
  REGION 1..12: note = Building block peptide "PEP"
  VARIANT 6..7: note = Xaa is C or S
KASKAXXVPEKL

SEQ ID NO: 6526 - protein, 12 aa, synthetic construct
  REGION 1..12: note = Building block peptide "PEP"
  VARIANT 6..7: note = Xaa is C or S
KASKAXXVPQKL

SEQ ID NO: 6527 - protein, 12 aa, synthetic construct
  REGION 1..12: note = Building block peptide "PEP"
  VARIANT 6..7: note = Xaa is C or S
KASKAXXVPTKL

SEQ ID NO: 6528 - protein, 12 aa, synthetic construct
  REGION 1..12: note = Building block peptide "PEP"
  VARIANT 6..7: note = Xaa is C or S
KASKAXXVSQKL

SEQ ID NO: 6529 - protein, 12 aa, synthetic construct
  REGION 1..12: note = Building block peptide "PEP"
  VARIANT 6..7: note = Xaa is C or S
KIPKAXXAPTEL

SEQ ID NO: 6530 - protein, 12 aa, synthetic construct
  REGION 1..12: note = Building block peptide "PEP"
  VARIANT 6..7: note = Xaa is C or S
KIPKAXXAPVEL

SEQ ID NO: 6531 - protein, 12 aa, synthetic construct
  REGION 1..12: note = Building block peptide "PEP"
  VARIANT 6..7: note = Xaa is C or S
KIPKAXXTPTEL

SEQ ID NO: 6532 - protein, 12 aa, synthetic construct
  REGION 1..12: note = Building block peptide "PEP"
  VARIANT 6..7: note = Xaa is C or S
KIPKAXXVPAEL

SEQ ID NO: 6533 - protein, 12 aa, synthetic construct
  REGION 1..12: note = Building block peptide "PEP"
  VARIANT 6..7: note = Xaa is C or S
KIPKAXXVPEEL

SEQ ID NO: 6534 - protein, 12 aa, synthetic construct
  REGION 1..12: note = Building block peptide "PEP"
  VARIANT 6..7: note = Xaa is C or S
KIPKAXXVPQEL

SEQ ID NO: 6535 - protein, 12 aa, synthetic construct
  REGION 1..12: note = Building block peptide "PEP"
  VARIANT 6..7: note = Xaa is C or S
KIPKAXXVPTEL

SEQ ID NO: 6536 - protein, 12 aa, synthetic construct
  REGION 1..12: note = Building block peptide "PEP"
  VARIANT 6..7: note = Xaa is C or S
KIPKAXXVSQEL

SEQ ID NO: 6537 - protein, 12 aa, synthetic construct
  REGION 1..12: note = Building block peptide "PEP"
  VARIANT 6..7: note = Xaa is C or S
KVGKAXXAPTKL

SEQ ID NO: 6538 - protein, 12 aa, synthetic construct
  REGION 1..12: note = Building block peptide "PEP"
  VARIANT 6..7: note = Xaa is C or S
KVGKAXXAPVKL

SEQ ID NO: 6539 - protein, 12 aa, synthetic construct
  REGION 1..12: note = Building block peptide "PEP"
  VARIANT 6..7: note = Xaa is C or S
KVGKAXXTPTKL

SEQ ID NO: 6540 - protein, 12 aa, synthetic construct
  REGION 1..12: note = Building block peptide "PEP"
  VARIANT 6..7: note = Xaa is C or S
KVGKAXXVPAKL

SEQ ID NO: 6541 - protein, 12 aa, synthetic construct
  REGION 1..12: note = Building block peptide "PEP"
  VARIANT 6..7: note = Xaa is C or S
KVGKAXXVPEKL

SEQ ID NO: 6542 - protein, 12 aa, synthetic construct
  REGION 1..12: note = Building block peptide "PEP"
  VARIANT 6..7: note = Xaa is C or S
KVGKAXXVPQKL

SEQ ID NO: 6543 - protein, 12 aa, synthetic construct
  REGION 1..12: note = Building block peptide "PEP"
  VARIANT 6..7: note = Xaa is C or S
KVGKAXXVPTKL

SEQ ID NO: 6544 - protein, 12 aa, synthetic construct
  REGION 1..12: note = Building block peptide "PEP"
  VARIANT 6..7: note = Xaa is C or S
KVGKAXXVSQKL

SEQ ID NO: 6545 - protein, 12 aa, synthetic construct
  REGION 1..12: note = Building block peptide "PEP"
  VARIANT 7: note = Xaa is C or S
NDEGLEXVPTEE

SEQ ID NO: 6546 - protein, 12 aa, synthetic construct
  REGION 1..12: note = Building block peptide "PEP"
  VARIANT 7: note = Xaa is C or S
NDEGLEXVPTGQ

SEQ ID NO: 6547 - protein, 12 aa, synthetic construct
  REGION 1..12: note = Building block peptide "PEP"
  VARIANT 5: note = Xaa is C or S
RNVQXRPSRVQL

SEQ ID NO: 6548 - protein, 12 aa, synthetic construct
  REGION 1..12: note = Building block peptide "PEP"
  VARIANT 5: note = Xaa is C or S
RNVQXRPTQVQL

SEQ ID NO: 6549 - protein, 12 aa, synthetic construct
  REGION 1..12: note = Building block peptide "PEP"
  VARIANT 6..7: note = Xaa is C or S
RVPSTXXAPTKT

SEQ ID NO: 6550 - protein, 12 aa, synthetic construct
  REGION 1..12: note = Building block peptide "PEP"
  VARIANT 6..7: note = Xaa is C or S
RVPSTXXAPVKT

SEQ ID NO: 6551 - protein, 12 aa, synthetic construct
  REGION 1..12: note = Building block peptide "PEP"
  VARIANT 6..7: note = Xaa is C or S
RVPSTXXTPTKT

SEQ ID NO: 6552 - protein, 12 aa, synthetic construct
  REGION 1..12: note = Building block peptide "PEP"
  VARIANT 6..7: note = Xaa is C or S
RVPSTXXVPAKT

SEQ ID NO: 6553 - protein, 12 aa, synthetic construct
  REGION 1..12: note = Building block peptide "PEP"
  VARIANT 6..7: note = Xaa is C or S
RVPSTXXVPEKT

SEQ ID NO: 6554 - protein, 12 aa, synthetic construct
  REGION 1..12: note = Building block peptide "PEP"
  VARIANT 6..7: note = Xaa is C or S
RVPSTXXVPQKT

SEQ ID NO: 6555 - protein, 12 aa, synthetic construct
  REGION 1..12: note = Building block peptide "PEP"
  VARIANT 6..7: note = Xaa is C or S
RVPSTXXVPTKT

SEQ ID NO: 6556 - protein, 12 aa, synthetic construct
  REGION 1..12: note = Building block peptide "PEP"
  VARIANT 6..7: note = Xaa is C or S
RVPSTXXVSQKT

SEQ ID NO: 6557 - protein, 12 aa, synthetic construct
  REGION 1..12: note = Building block peptide "PEP"
  VARIANT 6..7: note = Xaa is C or S
SIPKAXXAPTEL

SEQ ID NO: 6558 - protein, 12 aa, synthetic construct
  REGION 1..12: note = Building block peptide "PEP"
  VARIANT 6..7: note = Xaa is C or S
SIPKAXXAPVEL

SEQ ID NO: 6559 - protein, 12 aa, synthetic construct
  REGION 1..12: note = Building block peptide "PEP"
  VARIANT 6..7: note = Xaa is C or S
SIPKAXXTPTEL

SEQ ID NO: 6560 - protein, 12 aa, synthetic construct
  REGION 1..12: note = Building block peptide "PEP"
  VARIANT 6..7: note = Xaa is C or S
SIPKAXXVPAEL

SEQ ID NO: 6561 - protein, 12 aa, synthetic construct
  REGION 1..12: note = Building block peptide "PEP"
  VARIANT 6..7: note = Xaa is C or S
SIPKAXXVPEEL

SEQ ID NO: 6562 - protein, 12 aa, synthetic construct
  REGION 1..12: note = Building block peptide "PEP"
  VARIANT 6..7: note = Xaa is C or S
SIPKAXXVPQEL

SEQ ID NO: 6563 - protein, 12 aa, synthetic construct
  REGION 1..12: note = Building block peptide "PEP"
  VARIANT 6..7: note = Xaa is C or S
SIPKAXXVPTEL

SEQ ID NO: 6564 - protein, 12 aa, synthetic construct
  REGION 1..12: note = Building block peptide "PEP"
  VARIANT 6..7: note = Xaa is C or S
SIPKAXXVSQEL

SEQ ID NO: 6565 - protein, 12 aa, synthetic construct
  REGION 1..12: note = Building block peptide "PEP"
  VARIANT 5: note = Xaa is C or S
SSVKXQPSRVHH

SEQ ID NO: 6566 - protein, 12 aa, synthetic construct
  REGION 1..12: note = Building block peptide "PEP"
  VARIANT 5: note = Xaa is C or S
SSVKXQPTQVHH

SEQ ID NO: 6567 - protein, 12 aa, synthetic construct
  REGION 1..12: note = Building block peptide "PEP"
  VARIANT 6..7: note = Xaa is C or S
STPPTXXAPTRL

SEQ ID NO: 6568 - protein, 12 aa, synthetic construct
  REGION 1..12: note = Building block peptide "PEP"
  VARIANT 6..7: note = Xaa is C or S
STPPTXXAPVRL

SEQ ID NO: 6569 - protein, 12 aa, synthetic construct
  REGION 1..12: note = Building block peptide "PEP"
  VARIANT 6..7: note = Xaa is C or S
STPPTXXTPTRL

SEQ ID NO: 6570 - protein, 12 aa, synthetic construct
  REGION 1..12: note = Building block peptide "PEP"
  VARIANT 6..7: note = Xaa is C or S
STPPTXXVPARL

SEQ ID NO: 6571 - protein, 12 aa, synthetic construct
  REGION 1..12: note = Building block peptide "PEP"
  VARIANT 6..7: note = Xaa is C or S
STPPTXXVPERL

SEQ ID NO: 6572 - protein, 12 aa, synthetic construct
  REGION 1..12: note = Building block peptide "PEP"
  VARIANT 6..7: note = Xaa is C or S
STPPTXXVPQRL

SEQ ID NO: 6573 - protein, 12 aa, synthetic construct
  REGION 1..12: note = Building block peptide "PEP"
  VARIANT 6..7: note = Xaa is C or S
STPPTXXVPTRL

SEQ ID NO: 6574 - protein, 12 aa, synthetic construct
  REGION 1..12: note = Building block peptide "PEP"
  VARIANT 6..7: note = Xaa is C or S
STPPTXXVSQRL

SEQ ID NO: 6575 - protein, 12 aa, synthetic construct
  REGION 1..12: note = Building block peptide "PEP"
  VARIANT 6..7: note = Xaa is C or S
TVPKPXXAPTQL

SEQ ID NO: 6576 - protein, 12 aa, synthetic construct
  REGION 1..12: note = Building block peptide "PEP"
  VARIANT 6..7: note = Xaa is C or S
TVPKPXXAPVQL

SEQ ID NO: 6577 - protein, 12 aa, synthetic construct
  REGION 1..12: note = Building block peptide "PEP"
  VARIANT 6..7: note = Xaa is C or S
TVPKPXXTPTQL

SEQ ID NO: 6578 - protein, 12 aa, synthetic construct
  REGION 1..12: note = Building block peptide "PEP"
  VARIANT 6..7: note = Xaa is C or S
TVPKPXXVPAQL

SEQ ID NO: 6579 - protein, 12 aa, synthetic construct
  REGION 1..12: note = Building block peptide "PEP"
  VARIANT 6..7: note = Xaa is C or S
TVPKPXXVPEQL

SEQ ID NO: 6580 - protein, 12 aa, synthetic construct
  REGION 1..12: note = Building block peptide "PEP"
  VARIANT 6..7: note = Xaa is C or S
TVPKPXXVPQQL

SEQ ID NO: 6581 - protein, 12 aa, synthetic construct
  REGION 1..12: note = Building block peptide "PEP"
  VARIANT 6..7: note = Xaa is C or S
TVPKPXXVPTQL

SEQ ID NO: 6582 - protein, 12 aa, synthetic construct
  REGION 1..12: note = Building block peptide "PEP"
  VARIANT 6..7: note = Xaa is C or S
TVPKPXXVSQQL

SEQ ID NO: 6583 - protein, 12 aa, synthetic construct
  REGION 1..12: note = Building block peptide "PEP"
  VARIANT 6..7: note = Xaa is C or S
YVPKPXXAPTKL

SEQ ID NO: 6584 - protein, 12 aa, synthetic construct
  REGION 1..12: note = Building block peptide "PEP"
  VARIANT 6..7: note = Xaa is C or S
YVPKPXXAPVKL

SEQ ID NO: 6585 - protein, 12 aa, synthetic construct
  REGION 1..12: note = Building block peptide "PEP"
  VARIANT 6..7: note = Xaa is C or S
YVPKPXXTPTKL

SEQ ID NO: 6586 - protein, 12 aa, synthetic construct
  REGION 1..12: note = Building block peptide "PEP"
  VARIANT 6..7: note = Xaa is C or S
YVPKPXXVPAKL

SEQ ID NO: 6587 - protein, 12 aa, synthetic construct
  REGION 1..12: note = Building block peptide "PEP"
  VARIANT 6..7: note = Xaa is C or S
YVPKPXXVPEKL

SEQ ID NO: 6588 - protein, 12 aa, synthetic construct
  REGION 1..12: note = Building block peptide "PEP"
  VARIANT 6..7: note = Xaa is C or S
YVPKPXXVPQKL

SEQ ID NO: 6589 - protein, 12 aa, synthetic construct
  REGION 1..12: note = Building block peptide "PEP"
  VARIANT 6..7: note = Xaa is C or S
YVPKPXXVPTKL

SEQ ID NO: 6590 - protein, 12 aa, synthetic construct
  REGION 1..12: note = Building block peptide "PEP"
  VARIANT 6..7: note = Xaa is C or S
YVPKPXXVSQKL

SEQ ID NO: 6591 - protein, 8 aa, synthetic construct
  REGION 1..8: note = Building block peptide "PEP"
  VARIANT 5: note = Xaa is G, A, V, L, I, P, F, M, W, T or S
EPISXLYL

SEQ ID NO: 6592 - protein, 8 aa, synthetic construct
  REGION 1..8: note = Building block peptide "PEP"
  VARIANT 5: note = Xaa is G, A, V, L, I, P, F, M, W, T or S
EPLPXVYY

SEQ ID NO: 6593 - protein, 8 aa, synthetic construct
  REGION 1..8: note = Building block peptide "PEP"
  VARIANT 5: note = Xaa is G, A, V, L, I, P, F, M, W, T or S
EPLTXLYY

SEQ ID NO: 6594 - protein, 8 aa, synthetic construct
  REGION 1..8: note = Building block peptide "PEP"
  VARIANT 5: note = Xaa is G, A, V, L, I, P, F, M, W, T or S
KPLSXLYV

SEQ ID NO: 6595 - protein, 8 aa, synthetic construct
  REGION 1..8: note = Building block peptide "PEP"
  VARIANT 5: note = Xaa is G, A, V, L, I, P, F, M, W, T or S
NAISXLYF

SEQ ID NO: 6596 - protein, 8 aa, synthetic construct
  REGION 1..8: note = Building block peptide "PEP"
  VARIANT 5: note = Xaa is G, A, V, L, I, P, F, M, W, T or S
RPVQXRKI

SEQ ID NO: 6597 - protein, 8 aa, synthetic construct
  REGION 1..8: note = Building block peptide "PEP"
  VARIANT 5: note = Xaa is G, A, V, L, I, P, F, M, W, T or S
RSVKXAKV

SEQ ID NO: 6598 - protein, 8 aa, synthetic construct
  REGION 1..8: note = Building block peptide "PEP"
  VARIANT 5: note = Xaa is G, A, V, L, I, P, F, M, W, T or S
SAISXLYL

SEQ ID NO: 6599 - protein, 8 aa, synthetic construct
  REGION 1..8: note = Building block peptide "PEP"
  VARIANT 5: note = Xaa is G, A, V, L, I, P, F, M, W, T or S
SATSXLYY

SEQ ID NO: 6600 - protein, 8 aa, synthetic construct
  REGION 1..8: note = Building block peptide "PEP"
  VARIANT 5: note = Xaa is G, A, V, L, I, P, F, M, W, T or S
SNITXQIM

SEQ ID NO: 6601 - protein, 8 aa, synthetic construct
  REGION 1..8: note = Building block peptide "PEP"
  VARIANT 5: note = Xaa is G, A, V, L, I, P, F, M, W, T or S
SPINXLYF

SEQ ID NO: 6602 - protein, 8 aa, synthetic construct
  REGION 1..8: note = Building block peptide "PEP"
  VARIANT 5: note = Xaa is G, A, V, L, I, P, F, M, W, T or S
SPISXLFI

SEQ ID NO: 6603 - protein, 8 aa, synthetic construct
  REGION 1..8: note = Building block peptide "PEP"
  VARIANT 5: note = Xaa is G, A, V, L, I, P, F, M, W, T or S
SPISXLYI

SEQ ID NO: 6604 - protein, 8 aa, synthetic construct
  REGION 1..8: note = Building block peptide "PEP"
  VARIANT 5: note = Xaa is G, A, V, L, I, P, F, M, W, T or S
SPISXLYK

SEQ ID NO: 6605 - protein, 8 aa, synthetic construct
  REGION 1..8: note = Building block peptide "PEP"
  VARIANT 5: note = Xaa is G, A, V, L, I, P, F, M, W, T or S
SSLSXLFF

SEQ ID NO: 6606 - skipped

SEQ ID NO: 6607 - protein, 4 aa, synthetic construct
  REGION 1..4: note = Building block peptide "PEP"
SIAN

SEQ ID NO: 6608 - protein, 4 aa, synthetic construct
  REGION 1..4: note = Building block peptide "PEP"
SIAS

SEQ ID NO: 6609 - protein, 4 aa, synthetic construct
  REGION 1..4: note = Building block peptide "PEP"
NIPS

SEQ ID NO: 6610 - protein, 5 aa, synthetic construct
  REGION 1..5: note = Example of Bioactive carrier-affinity-contaning group
GTPGP

SEQ ID NO: 6611 - protein, 5 aa, synthetic construct
  REGION 1..5: note = Example of Bioactive carrier-affinity-contaning group
WWFWG

SEQ ID NO: 6612 - protein, 20 aa, synthetic construct
  REGION 1..20: note = Examplary primary structure supporting PEPREF 3D coordinates
KIPKACCVPTELSAISMLYL

SEQ ID NO: 6613 - DNA, 22 bp, synthetic construct
  misc_feature 1..22: note = PCR Primer
  source 1..22: mol_type = other DNA
aagctaccactgataactcgcc

SEQ ID NO: 6614 - DNA, 22 bp, synthetic construct
  misc_feature 1..22: note = PCR Primer
  source 1..22: mol_type = other DNA
cttctttaccctcatcctgtcg

SEQ ID NO: 6615 - DNA, 20 bp, synthetic construct
  misc_feature 1..20: note = PCR Primer
  source 1..20: mol_type = other DNA
cactgttaccgccacttccc

SEQ ID NO: 6616 - DNA, 20 bp, synthetic construct
  misc_feature 1..20: note = PCR Primer
  source 1..20: mol_type = other DNA
accagcggaagtccccttcg

SEQ ID NO: 6617 - DNA, 20 bp, synthetic construct
  misc_feature 1..20: note = PCR Primer
  source 1..20: mol_type = other DNA
gctctgtggcatacaggaga

SEQ ID NO: 6618 - DNA, 20 bp, synthetic construct
  misc_feature 1..20: note = PCR Primer
  source 1..20: mol_type = other DNA
catagaatcgcaccctgatg

SEQ ID NO: 6619 - DNA, 20 bp, synthetic construct
  misc_feature 1..20: note = PCR Primer
  source 1..20: mol_type = other DNA
gacgtgcccaggcgtatttc

SEQ ID NO: 6620 - DNA, 20 bp, synthetic construct
  misc_feature 1..20: note = PCR Primer
  source 1..20: mol_type = other DNA
aagtctggggtccgtcaagg

SEQ ID NO: 6621 - DNA, 20 bp, synthetic construct
  misc_feature 1..20: note = PCR Primer
  source 1..20: mol_type = other DNA
gcagtacagccccaaaatgg

SEQ ID NO: 6622 - DNA, 22 bp, synthetic construct
  misc_feature 1..22: note = PCR Primer
  source 1..22: mol_type = other DNA
acaaagtccggcctgtatccaa
